(19) United States
(12) Patent Application Publication
(10) Pub. No.: US 2023/0058162 A1
(43) Pub. Date: Feb. 23, 2023

(54) MULTIMERIC CORONAVIRUS BINDING MOLECULES AND USES THEREOF

(71) Applicant: IGM Biosciences, Inc., Mountain View, CA (US)

(72) Inventors: Paul R. Hinton, Sunnyvale, CA (US); Bruce Alan Keyt, Hillsborough, CA (US); Dean Ng, San Francisco, CA (US); Kathy Miller, San Francisco, CA (US); Deepal Pandya, Fremont, CA (US); Stephen F. Carroll, Walnut Creek, CA (US)

(21) Appl. No.: 17/386,397

(22) Filed: Jul. 27, 2021

Related U.S. Application Data
(60) Provisional application No. 63/057,244, filed on Jul. 27, 2020.
(60) Provisional application No. 63/133,153, filed on Dec. 31, 2020.
(60) Provisional application No. 63/133,276, filed on Jan. 1, 2021.
(60) Provisional application No. 63/150,491, filed on Feb. 17, 2021.

(51) Int. Cl. C07K 16/10

(52) U.S. Cl. CPC C07K 16/10; C07K 2317/35; A61K 2039/505; C07K 2317/76; C07K 2317/565; C07K 2317/92

(57) ABSTRACT

This disclosure provides multimeric binding molecules that bind to a human coronavirus, e.g., MERS-CoV, SARS-CoV or SARS-CoV-2. This disclosure also provides compositions comprising the multimeric binding molecules, polynucleotides that encode the multimeric binding molecules, and host cells that can produce the binding molecules. Further this disclosure provides methods of using the multimeric binding molecules, including methods for treating and preventing human coronavirus disease, e.g., coronavirus disease 2019 (COVID-19).

### CROSS-REFERENCE TO RELATED APPLICATIONS

[0001] This application claims the benefit of U.S. Provisional Patent Application Ser. Nos. 63/057,244, filed Jul. 27, 2020; 63/133,153, filed Dec. 31, 2020; 63/133,276, filed Jan. 1, 2021; and 63/150,491, filed Feb. 17, 2021, which are all each incorporated herein by reference in their entireties.

### SEQUENCE LISTING

[0002] The instant application contains a Sequence Listing which has been submitted electronically in ASCII format and is hereby incorporated by reference in its entirety. The ASCII copy, created on Jul. 27, 2021, is named 032US1-Sequence-Listing.txt and is 803,135 bytes in size.

### BACKGROUND

[0003] Antibodies and antibody-like molecules that can multimerize, such as IgA and IgM antibodies, have emerged as promising drug candidates, e.g., in the fields of immuno-oncology and infectious diseases, allowing for improved specificity, improved avidity, and the ability to bind to multiple binding targets. See, e.g., U.S. Pat. Nos. 9,951,134, 9,938,347, 10,351,631, 10,400,038, and 10,899,935, U.S. Patent Application Publication Nos. US 2019-0100597, US 2018-0009897, US 2019-0330374, US 2019-0330360, US 2019-0338040, US 2019-0338041, US 2019-0185570, US 2018-0265596, US 2018-0118816, US 2018-0118814, and US 2019-0002566, and PCT Publication Nos. WO 2018/187702, and WO 2019/165340, the contents of which are incorporated herein by reference in their entireties.

[0004] Severe acute respiratory syndrome coronavirus 2 (SARS-CoV-2) is a single stranded, positive sense enveloped RNA virus. SARS-CoV-2 causes Coronavirus Disease 2019 (COVID-19), which is currently causing a global pandemic. COVID-19 is highly contagious and commonly causes fever, cough, and shortness of breath, and can lead to pneumonia, blood clots, organ failure, and death. The four main structural proteins of the SARS-CoV-2 include spike (S), envelope (E), membrane (M), and nucleic capsid (N).

[0005] The trimeric S protein binds the angiotensin-converting enzyme 2 (ACE2) receptor, alters its conformation to a fusogenic protein, which facilitates fusion of the cellular and viral membranes and thereby enables SARS-CoV-2 to enter cells. The S protein comprises two units: S1 and S2, with the S1 domain comprising the receptor-binding domain (RBD). See, e.g., Lan, J., et al., Nature 581:215-220 (2020). The S protein and specifically the RBD are required for entry into cells, which has made the RBD a favored target of potential therapeutic monoclonal antibodies. Unfortunately, even the IgG antibodies having very potent neutralizing activity against the RBD of SARS-CoV-2 need to be administered by infusion at high doses (up to 8 grams per dose) to effectively treat COVID-19 patients (Weinreich, D M, et al., N Engl J Med doi: 10.1056/NEJMoa2035002 12020 (2021); Chen, et al., N Engl J Med doi: 10.1056/NEJMoa2029849 (2021)).

[0006] Despite this interest, antibody-dependent enhancement (ADE), also known as antibody-mediated enhancement (AME), of disease caused by SARS-CoV-2 is a concern and has been demonstrated in infections with other coronaviruses. See, e.g., Houser, K. V., et al., PLoS Pathog. 13: Article e1006565 (2017) (MERS-CoV); Weiss, R. C., and F. W. Scott Comp. Immunol. Microbiol. Infect. Dis 4:175-189 (1981) (feline infectious peritonitis virus); and Kam, Y. W., et al., Vaccine 25:729-740 (2007) (SARS-CoV). For example, Kam et al., showed that antibodies against the SARS-CoV S glycoprotein trimer were able to mediate entry of antibody-bound virus into B cells via FcγRII. If Fcγ receptor dependent entry into cells occurs with antibodies against SARS-CoV-2, conventional IgG antibody therapy may make the infection worse than no treatment at all.

[0007] In addition to the difficulties in developing therapeutic monoclonal antibodies in general, current practices for treating COVID-19 are severely limited. Remdesivir, convalescent plasma, and hyperimmune globulin have all received FDA emergency use authorizations. However, remdesivir has only been shown to shorten the hospitalization duration a short period of time. Similarly, convalescent plasma and hyperimmune globulin have shown some early signs of improving COVID-19 symptoms, but results are limited, and the plasma is obtained from patients and not manufactured, making it difficult to obtain and scale up and it inherently has lot to lot variations.

[0008] Other human coronaviruses also constitute public health risks. Middle East respiratory syndrome coronavirus (MERS-CoV) is endemic in the Middle East but can be transmitted to other countries by travel activity. For example, the introduction of MERS-CoV into the Republic of Korea by an infected traveler resulted in a hospital outbreak of MERS that entailed 186 cases and 38 deaths (Kleine-Weber et al., J. Virol. 2019, 93(2):e01381-18).

[0009] There remains an urgent need for therapeutics to treat and/or prevent human coronavirus infections, e.g., SARS, COVID-19, and diseases caused by MERS-CoV.

### SUMMARY

[0010] Provided herein is a multimeric binding molecule that includes two to six bivalent binding units or variants or fragments thereof, where each binding unit includes two IgM or IgA heavy chain constant regions or multimerizing fragments or variants thereof, each associated with a binding domain, where three to twelve of the binding domains are identical and specifically bind to a human coronavirus, and where the binding molecule is more potent than a bivalent reference IgG antibody that includes two of the binding domains that specifically bind to the human coronavirus. In some embodiments, the human coronavirus is SARS-CoV, MERS-CoV, SARS-CoV-2, variants thereof, derivatives thereof, or any combination thereof.

[0011] In some embodiments, the multimeric binding molecule can neutralize infectivity of the human coronavirus at a greater potency than the bivalent reference IgG antibody that includes two of the binding domains that specifically bind to the human coronavirus. In some embodiments, the multimeric binding molecule can neutralize infectivity of the human coronavirus at a lower 50% effective concentration (EC₅₀) than the bivalent reference IgG antibody. In some embodiments, the EC₅₀ is at least two-fold, at least five-fold, at least ten-fold, at least fifty-fold, at least 100-fold, at least 500-fold, or at least 1000-fold lower than the EC₅₀ of the bivalent reference IgG antibody.

[0012] In some embodiments, the binding molecule can inhibit binding of the human coronavirus to its receptor at a lower 50% inhibitory concentration (IC₅₀) than the bivalent reference IgG antibody. In some embodiments, the human coronavirus bound by the multimeric binding molecule is SARS-CoV or SARS-CoV-2 and the receptor is human angiotensin-converting enzyme 2 (ACE2). In some embodiments, the human coronavirus is MERS-CoV and the receptor is human dipeptidyl-peptidase 4 (DPP4).

[0013] In some embodiments, the three to twelve binding domains of the multimeric binding molecule of the disclosure bind a human coronavirus structural protein or fragment thereof. In some embodiments the human coronavirus structural protein is a nucleocapsid (N) protein, a membrane (M) protein, an envelope (E) protein, a spike (S) protein, any fragment thereof, any subunit thereof, or any combination thereof. In some embodiments, the human coronavirus structural protein is the S protein, a fragment thereof, or a subunit thereof. In some embodiments, the three to twelve binding domains of the multimeric binding protein specifically bind to the S protein subunit 1 (S1), the S protein receptor binding domain (RBD), the S protein subunit 2 (S2), the S protein furin cleavage site, or any combination thereof. In certain embodiments the three to twelve binding domains of the multimeric binding protein specifically bind to the SARS-CoV-2 RBD.

[0014] In some embodiments, the three to twelve identical binding domains of the multimeric binding molecule are immunoglobulin antigen binding domains that include a heavy chain variable region (VH) and a light chain variable region (VL). In some embodiments, each binding unit includes two heavy chains each including a VH and two light chains each including a VL. In some embodiments, the immunoglobulin antigen-binding domains are human or humanized antigen binding domains. In some embodiments, the three to twelve identical binding domains of the multimeric binding molecule are single-domain variable regions (VHH), and where each binding unit includes two heavy chains each including the VHH.

[0015] In some embodiments, the three to twelve identical binding domains of the multimeric binding molecule each specifically bind to SARS-CoV-2, and include a heavy chain variable region (VH) and a light chain variable region (VL), where the VH and VL include six immunoglobulin complementarity determining regions HCDR1, HCDR2, HCDR3, LCDR1, LCDR2, and LCDR3, where the HCDR1, HCDR2, HCDR3, LCDR1, LCDR2, and LCDR3 include the CDRs of an antibody that includes the VH and VL of SEQ ID NO: 84 and SEQ ID NO: 85, SEQ ID NO: 86 and SEQ ID NO: 87, SEQ ID NO: 88 and SEQ ID NO: 89, SEQ ID NO: 90 and SEQ ID NO: 91, SEQ ID NO: 92 and SEQ ID NO: 93, SEQ ID NO: 94 and SEQ ID NO: 95, SEQ ID NO: 96 and SEQ ID NO: 97, SEQ ID NO: 98 and SEQ ID NO: 99, SEQ ID NO: 100 and SEQ ID NO: 101, SEQ ID NO: 102 and SEQ ID NO: 103, SEQ ID NO: 104 and SEQ ID NO: 105, SEQ ID NO: 106 and SEQ ID NO: 107, SEQ ID NO: 108 and SEQ ID NO: 109, SEQ ID NO: 110 and SEQ ID NO: 111, SEQ ID NO: 112 and SEQ ID NO: 113, SEQ ID NO: 114 and SEQ ID NO: 115, SEQ ID NO: 116 and SEQ ID NO: 117, SEQ ID NO: 118 and SEQ ID NO: 119, SEQ ID NO: 120 and SEQ ID NO: 121, SEQ ID NO: 122 and SEQ ID NO: 123, SEQ ID NO: 124 and SEQ ID NO: 125, SEQ ID NO: 126 and SEQ ID NO: 127, SEQ ID NO: 128 and SEQ ID NO: 129, SEQ ID NO: 130 and SEQ ID NO: 131, SEQ ID NO: 132 and SEQ ID NO: 133, SEQ ID NO: 134 and SEQ ID NO: 135, SEQ ID NO: 136 and SEQ ID NO: 137, SEQ ID NO: 138 and SEQ ID NO: 139, SEQ ID NO: 140 and SEQ ID NO: 141, SEQ ID NO: 142 and SEQ ID NO: 143, SEQ ID NO: 144 and SEQ ID NO: 145, SEQ ID NO: 146 and SEQ ID NO: 147, SEQ ID NO: 148 and SEQ ID NO: 149, SEQ ID NO: 150 and SEQ ID NO: 151, SEQ ID NO: 152 and SEQ ID NO: 153, SEQ ID NO: 154 and SEQ ID NO: 155, SEQ ID NO: 156 and SEQ ID NO: 157, SEQ ID NO: 158 and SEQ ID NO: 159, SEQ ID NO: 160 and SEQ ID NO: 161, SEQ ID NO: 162 and SEQ ID NO: 163, SEQ ID NO: 164 and SEQ ID NO: 165, SEQ ID NO: 166 and SEQ ID NO: 167, SEQ ID NO: 168 and SEQ ID NO: 169, SEQ ID NO: 170 and SEQ ID NO: 171, SEQ ID NO: 172 and SEQ ID NO: 173, SEQ ID NO: 174 and SEQ ID NO: 175, SEQ ID NO: 176 and SEQ ID NO: 177, SEQ ID NO: 178 and SEQ ID NO: 179, SEQ ID NO: 180 and SEQ ID NO: 181, SEQ ID NO: 182 and SEQ ID NO: 183, SEQ ID NO: 184 and SEQ ID NO: 185, SEQ ID NO: 186 and SEQ ID NO: 187, SEQ ID NO: 188 and SEQ ID NO: 189, SEQ ID NO: 190 and SEQ ID NO: 191, SEQ ID NO: 192 and SEQ ID NO: 193, SEQ ID NO: 194 and SEQ ID NO: 195, SEQ ID NO: 196 and SEQ ID NO: 197, SEQ ID NO: 198 and SEQ ID NO: 199, SEQ ID NO: 200 and SEQ ID NO: 201, SEQ ID NO: 202 and SEQ ID NO: 203, SEQ ID NO: 204 and SEQ ID NO: 205, SEQ ID NO: 206 and SEQ ID NO: 207, SEQ ID NO: 208 and SEQ ID NO: 209, SEQ ID NO: 210 and SEQ ID NO: 211, SEQ ID NO: 212 and SEQ ID NO: 213, SEQ ID NO: 214 and SEQ ID NO: 215, SEQ ID NO: 216 and SEQ ID NO: 217, SEQ ID NO: 218 and SEQ ID NO: 219, SEQ ID NO: 220 and SEQ ID NO: 221, SEQ ID NO: 222 and SEQ ID NO: 223, SEQ ID NO: 224 and SEQ ID NO: 225, SEQ ID NO: 226 and SEQ ID NO: 227, SEQ ID NO: 228 and SEQ ID NO: 229, SEQ ID NO: 230 and SEQ ID NO: 231, SEQ ID NO: 232 and SEQ ID NO: 233, SEQ ID NO: 234 and SEQ ID NO: 235, SEQ ID NO: 236 and SEQ ID NO: 237, SEQ ID NO: 238 and SEQ ID NO: 239, SEQ ID NO: 240 and SEQ ID NO: 241, SEQ ID NO: 242 and SEQ ID NO: 243, SEQ ID NO: 244 and SEQ ID NO: 245, SEQ ID NO: 246 and SEQ ID NO: 247, SEQ ID NO: 248 and SEQ ID NO: 249, SEQ ID NO: 250 and SEQ ID NO: 251, SEQ ID NO: 252 and SEQ ID NO: 253, SEQ ID NO: 254 and SEQ ID NO: 255, SEQ ID NO: 256 and SEQ ID NO: 257, SEQ ID NO: 258 and SEQ ID NO: 259, SEQ ID NO: 260 and SEQ ID NO: 261, SEQ ID NO: 264 and SEQ ID NO: 265, SEQ ID NO: 266 and SEQ ID NO: 267, SEQ ID NO: 268 and SEQ ID NO: 269, SEQ ID NO: 270 and SEQ ID NO: 271, SEQ ID NO: 272 and SEQ ID NO: 273, SEQ ID NO: 274 and SEQ ID NO: 275, SEQ ID NO: 276 and SEQ ID NO: 277, SEQ ID NO: 278 and SEQ ID NO: 279, SEQ ID NO: 280 and SEQ ID NO: 281, SEQ ID NO: 282 and SEQ ID NO: 283, SEQ ID NO: 292 and SEQ ID NO: 293, SEQ ID NO: 294 and SEQ ID NO: 295, SEQ ID NO: 296 and SEQ ID NO: 297, SEQ ID NO: 298 and SEQ ID NO: 299, SEQ ID NO: 300 and SEQ ID NO: 301, SEQ ID NO: 302 and SEQ ID NO: 303, SEQ ID NO: 304 and SEQ ID NO: 305, SEQ ID NO: 306 and SEQ ID NO: 307, SEQ ID NO: 308 and SEQ ID NO: 309, SEQ ID NO: 310 and SEQ ID NO: 311, SEQ ID NO: 312 and SEQ ID NO: 313, SEQ ID NO: 314 and SEQ ID NO: 315, SEQ ID NO: 316 and SEQ ID NO: 317, SEQ ID NO: 318 and SEQ ID NO: 319, SEQ ID NO: 320 and SEQ ID NO: 321, SEQ ID NO: 322 and SEQ ID NO: 323, SEQ ID NO: 324 and SEQ ID NO: 325, SEQ ID NO: 326 and SEQ ID NO: 327, SEQ ID NO: 328 and SEQ ID NO: 329, SEQ ID NO: 330 and SEQ ID NO: 331, SEQ ID NO: 332 and SEQ ID NO: 333, SEQ ID NO: 336 and SEQ ID NO: 337, SEQ ID NO: 338 and SEQ ID NO: 339, SEQ ID NO: 340 and SEQ ID NO: 341, SEQ ID NO: 342 and SEQ ID NO: 343, SEQ ID NO: 344 and SEQ ID NO: 345, SEQ ID NO: 348 and SEQ ID NO: 349, SEQ ID NO: 350 and SEQ ID NO: 351, SEQ ID NO: 352 and SEQ ID NO: 353, SEQ ID NO: 354 and SEQ ID NO: 355, SEQ ID NO: 356 and SEQ ID NO: 357, SEQ ID NO: 358 and SEQ ID NO: 359, SEQ ID NO: 362 and SEQ ID NO: 363, SEQ ID NO: 364 and SEQ ID NO: 365, SEQ ID NO: 366 and SEQ ID NO: 367, SEQ ID NO: 368 and SEQ ID NO: 369, SEQ ID NO: 370 and SEQ ID NO: 371, SEQ ID NO: 372 and SEQ ID NO: 373, SEQ ID NO: 374 and SEQ ID NO: 375, SEQ ID NO: 376 and SEQ ID NO: 377, SEQ ID NO: 378 and SEQ ID NO: 379, SEQ ID NO: 380 and SEQ ID NO: 381, SEQ ID NO: 382 and SEQ ID NO: 383, SEQ ID NO: 384 and SEQ ID NO: 385, SEQ ID NO: 386 and SEQ ID NO: 387, SEQ ID NO: 388 and SEQ ID NO: 389, SEQ ID NO: 390 and SEQ ID NO: 391, SEQ ID NO: 392 and SEQ ID NO: 393, SEQ ID NO: 394 and SEQ ID NO: 395, SEQ ID NO: 396 and SEQ ID NO: 397, SEQ ID NO: 398 and SEQ ID NO: 399, SEQ ID NO: 400 and SEQ ID NO: 401, SEQ ID NO: 402 and SEQ ID NO: 403, SEQ ID NO: 404 and SEQ ID NO: 405, SEQ ID NO: 406 and SEQ ID NO: 407, SEQ ID NO: 408 and SEQ ID NO: 409, SEQ ID NO: 410 and SEQ ID NO: 411, SEQ ID NO: 412 and SEQ ID NO: 413, SEQ ID NO: 414 and SEQ ID NO: 415, SEQ ID NO: 416 and SEQ ID NO: 417, SEQ ID NO: 418 and SEQ ID NO: 419, SEQ ID NO: 420 and SEQ ID NO: 421, SEQ ID NO: 422 and SEQ ID NO: 423, SEQ ID NO: 424 and SEQ ID NO: 425, SEQ ID NO: 426 and SEQ ID NO: 427, SEQ ID NO: 428 and SEQ ID NO: 429, SEQ ID NO: 430 and SEQ ID NO: 431, SEQ ID NO: 432 and SEQ ID NO: 433, SEQ ID NO: 434 and SEQ ID NO: 435, SEQ ID NO: 436 and SEQ ID NO: 437, SEQ ID NO: 438 and SEQ ID NO: 439, SEQ ID NO: 440 and SEQ ID NO: 441, SEQ ID NO: 442 and SEQ ID NO: 443, SEQ ID NO: 444 and SEQ ID NO: 445, SEQ ID NO: 446 and SEQ ID NO: 447, SEQ ID NO: 448 and SEQ ID NO: 449, SEQ ID NO: 450 and SEQ ID NO: 451, SEQ ID NO: 452 and SEQ ID NO: 453, SEQ ID NO: 454 and SEQ ID NO: 455, SEQ ID NO: 456 and SEQ ID NO: 457, SEQ ID NO: 458 and SEQ ID NO: 459, SEQ ID NO: 460 and SEQ ID NO: 461, SEQ ID NO: 462 and SEQ ID NO: 463, SEQ ID NO: 464 and SEQ ID NO: 465, SEQ ID NO: 466 and SEQ ID NO: 467, SEQ ID NO: 468 and SEQ ID NO: 469, SEQ ID NO: 470 and SEQ ID NO: 471, SEQ ID NO: 472 and SEQ ID NO: 473, SEQ ID NO: 474 and SEQ ID NO: 475, SEQ ID NO: 476 and SEQ ID NO: 477, SEQ ID NO: 478 and SEQ ID NO: 479, SEQ ID NO: 480 and SEQ ID NO: 481, SEQ ID NO: 482 and SEQ ID NO: 483, SEQ ID NO: 484 and SEQ ID NO: 485, SEQ ID NO: 486 and SEQ ID NO: 487, SEQ ID NO: 488 and SEQ ID NO: 489, SEQ ID NO: 490 and SEQ ID NO: 491, SEQ ID NO: 492 and SEQ ID NO: 493, SEQ ID NO: 494 and SEQ ID NO: 495, SEQ ID NO: 496 and SEQ ID NO: 497, SEQ ID NO: 498 and SEQ ID NO: 499, SEQ ID NO: 500 and SEQ ID NO: 501, SEQ ID NO: 502 and SEQ ID NO: 503, SEQ ID NO: 504 and SEQ ID NO: 505, SEQ ID NO: 506 and SEQ ID NO: 507, SEQ ID NO: 508 and SEQ ID NO: 509, SEQ ID NO: 628 and SEQ ID NO: 629, SEQ ID NO: 630 and SEQ ID NO: 631, SEQ ID NO: 632 and SEQ ID NO: 633, SEQ ID NO: 634 and SEQ ID NO: 635, SEQ ID NO: 636 and SEQ ID NO: 637, SEQ ID NO: 638 and SEQ ID NO: 639, SEQ ID NO: 640 and SEQ ID NO: 641, SEQ ID NO: 642 and SEQ ID NO: 643, SEQ ID NO: 644 and SEQ ID NO: 645, SEQ ID NO: 646 and SEQ ID NO: 647, SEQ ID NO: 648 and SEQ ID NO: 649, SEQ ID NO: 650 and SEQ ID NO: 651, or SEQ ID NO: 652 and SEQ ID NO: 653, respectively with zero, one, or two single amino acid substitutions in one or more of the HCDRs or LCDRs. In some embodiments, the VH and VL of the multimeric binding molecule include amino acid sequences at least 80%, at least 85%, at least 90%, at least 95% or 100% identical to the recited VH and VL amino acid sequences, respectively.

[0016] In some embodiments, the three to twelve identical binding domains of the multimeric binding molecule each specifically bind to SARS-CoV-2, and the VH and VL of the multimeric binding molecule include six immunoglobulin complementarity determining regions HCDR1, HCDR2, HCDR3, LCDR1, LCDR2, and LCDR3, where the HCDR1, HCDR2, HCDR3, LCDR1, LCDR2, and LCDR3 include the CDRs of an antibody that includes the VH and VL of SEQ ID NO: 86 and SEQ ID NO: 87, SEQ ID NO: 88 and SEQ ID NO: 89, SEQ ID NO: 90 and SEQ ID NO: 91, SEQ ID NO: 92 and SEQ ID NO: 93, SEQ ID NO: 94 and SEQ ID NO: 95, SEQ ID NO: 96 and SEQ ID NO: 97, SEQ ID NO: 98 and SEQ ID NO: 99, SEQ ID NO: 100 and SEQ ID NO: 101, SEQ ID NO: 102 and SEQ ID NO: 103, SEQ ID NO: 106 and SEQ ID NO: 107, SEQ ID NO: 110 and SEQ ID NO: 111, SEQ ID NO: 118 and SEQ ID NO: 119, SEQ ID NO: 128 and SEQ ID NO: 129, SEQ ID NO: 130 and SEQ ID NO: 131, SEQ ID NO: 132 and SEQ ID NO: 133, SEQ ID NO: 134 and SEQ ID NO: 135, SEQ ID NO: 136 and SEQ ID NO: 137, SEQ ID NO: 142 and SEQ ID NO: 143, SEQ ID NO: 146 and SEQ ID NO: 147, SEQ ID NO: 150 and SEQ ID NO: 151, SEQ ID NO: 156 and SEQ ID NO: 157, SEQ ID NO: 160 and SEQ ID NO: 161, SEQ ID NO: 162 and SEQ ID NO: 163, SEQ ID NO: 164 and SEQ ID NO: 165, SEQ ID NO: 166 and SEQ ID NO: 167, SEQ ID NO: 168 and SEQ ID NO: 169, SEQ ID NO: 170 and SEQ ID NO: 171, SEQ ID NO: 172 and SEQ ID NO: 173, SEQ ID NO: 174 and SEQ ID NO: 175, SEQ ID NO: 176 and SEQ ID NO: 177, SEQ ID NO: 180 and SEQ ID NO: 181, SEQ ID NO: 182 and SEQ ID NO: 183, SEQ ID NO: 186 and SEQ ID NO: 187, SEQ ID NO: 188 and SEQ ID NO: 189, SEQ ID NO: 194 and SEQ ID NO: 195, SEQ ID NO: 200 and SEQ ID NO: 201, SEQ ID NO: 206 and SEQ ID NO: 207, SEQ ID NO: 208 and SEQ ID NO: 209, SEQ ID NO: 218 and SEQ ID NO: 219, SEQ ID NO: 220 and SEQ ID NO: 221, SEQ ID NO: 222 and SEQ ID NO: 223, SEQ ID NO: 224 and SEQ ID NO: 225, SEQ ID NO: 228 and SEQ ID NO: 229, SEQ ID NO: 230 and SEQ ID NO: 231, SEQ ID NO: 240 and SEQ ID NO: 241, SEQ ID NO: 244 and SEQ ID NO: 245, SEQ ID NO: 246 and SEQ ID NO: 247, SEQ ID NO: 256 and SEQ ID NO: 257, SEQ ID NO: 258 and SEQ ID NO: 259, SEQ ID NO: 260 and SEQ ID NO: 261, SEQ ID NO: 264 and SEQ ID NO: 265, SEQ ID NO: 266 and SEQ ID NO: 267, SEQ ID NO: 268 and SEQ ID NO: 269, SEQ ID NO: 270 and SEQ ID NO: 271, SEQ ID NO: 272 and SEQ ID NO: 273, SEQ ID NO: 274 and SEQ ID NO: 275, SEQ ID NO: 276 and SEQ ID NO: 277, SEQ ID NO: 278 and SEQ ID NO: 279, SEQ ID NO: 280 and SEQ ID NO: 281, SEQ ID NO: 282 and SEQ ID NO: 283, SEQ ID NO: 292 and SEQ ID NO: 293, SEQ ID NO: 294 and SEQ ID NO: 295, SEQ ID NO: 296 and SEQ ID NO: 297, SEQ ID NO: 298 and SEQ ID NO: 299, SEQ ID NO: 300 and SEQ ID NO: 301, SEQ ID NO: 302 and SEQ ID NO: 303, SEQ ID NO: 304 and SEQ ID NO: 305, SEQ ID NO: 306 and SEQ ID NO: 307, SEQ ID NO: 308 and SEQ ID NO: 309, SEQ ID NO: 310 and SEQ ID NO: 311, SEQ ID NO: 312 and SEQ ID NO: 313, SEQ ID NO: 314 and SEQ ID NO: 315, SEQ ID NO: 316 and SEQ ID NO: 317, SEQ ID NO: 318 and SEQ ID NO: 319, SEQ ID NO: 320 and SEQ ID NO: 321, SEQ ID NO: 322 and SEQ ID NO: 323, SEQ ID NO: 324 and SEQ ID NO: 325, SEQ ID NO: 326 and SEQ ID NO: 327, SEQ ID NO: 328 and SEQ ID NO: 329, SEQ ID NO: 330 and SEQ ID NO: 331, SEQ ID NO: 332 and SEQ ID NO: 333, SEQ ID NO: 336 and SEQ ID NO: 337, SEQ ID NO: 338 and SEQ ID NO: 339, SEQ ID NO: 340 and SEQ ID NO: 341, SEQ ID NO: 342 and SEQ ID NO: 343, SEQ ID NO: 344 and SEQ ID NO: 345, SEQ ID NO: 348 and SEQ ID NO: 349, SEQ ID NO: 350 and SEQ ID NO: 351, SEQ ID NO: 352 and SEQ ID NO: 353, SEQ ID NO: 354 and SEQ ID NO: 355, SEQ ID NO: 356 and SEQ ID NO: 357, SEQ ID NO: 358 and SEQ ID NO: 359, SEQ ID NO: 360 and SEQ ID NO: 361, SEQ ID NO: 362 and SEQ ID NO: 363, SEQ ID NO: 364 and SEQ ID NO: 365, SEQ ID NO: 366 and SEQ ID NO: 367, SEQ ID NO: 368 and SEQ ID NO: 369, SEQ ID NO: 370 and SEQ ID NO: 371, SEQ ID NO: 372 and SEQ ID NO: 373, SEQ ID NO: 374 and SEQ ID NO: 375, SEQ ID NO: 376 and SEQ ID NO: 377, SEQ ID NO: 378 and SEQ ID NO: 379, SEQ ID NO: 380 and SEQ ID NO: 381, SEQ ID NO: 382 and SEQ ID NO: 383, SEQ ID NO: 384 and SEQ ID NO: 385, SEQ ID NO: 386 and SEQ ID NO: 387, SEQ ID NO: 388 and SEQ ID NO: 389, SEQ ID NO: 390 and SEQ ID NO: 391, SEQ ID NO: 392 and SEQ ID NO: 393, SEQ ID NO: 394 and SEQ ID NO: 395, SEQ ID NO: 396 and SEQ ID NO: 397, SEQ ID NO: 398 and SEQ ID NO: 399, SEQ ID NO: 400 and SEQ ID NO: 401, SEQ ID NO: 402 and SEQ ID NO: 403, SEQ ID NO: 404 and SEQ ID NO: 405, SEQ ID NO: 406 and SEQ ID NO: 407, SEQ ID NO: 408 and SEQ ID NO: 409, SEQ ID NO: 410 and SEQ ID NO: 411, SEQ ID NO: 412 and SEQ ID NO: 413, SEQ ID NO: 414 and SEQ ID NO: 415, SEQ ID NO: 416 and SEQ ID NO: 417, SEQ ID NO: 418 and SEQ ID NO: 419, SEQ ID NO: 420 and SEQ ID NO: 421, SEQ ID NO: 422 and SEQ ID NO: 423, SEQ ID NO: 424 and SEQ ID NO: 425, SEQ ID NO: 426 and SEQ ID NO: 427, SEQ ID NO: 428 and SEQ ID NO: 429, SEQ ID NO: 430 and SEQ ID NO: 431, SEQ ID NO: 432 and SEQ ID NO: 433, SEQ ID NO: 434 and SEQ ID NO: 435, SEQ ID NO: 436 and SEQ ID NO: 437, SEQ ID NO: 438 and SEQ ID NO: 439, SEQ ID NO: 440 and SEQ ID NO: 441, SEQ ID NO: 442 and SEQ ID NO: 443, SEQ ID NO: 444 and SEQ ID NO: 445, SEQ ID NO: 446 and SEQ ID NO: 447, SEQ ID NO: 448 and SEQ ID NO: 449, SEQ ID NO: 450 and SEQ ID NO: 451, SEQ ID NO: 452 and SEQ ID NO: 453, SEQ ID NO: 454 and SEQ ID NO: 455, SEQ ID NO: 456 and SEQ ID NO: 457, SEQ ID NO: 458 and SEQ ID NO: 459, SEQ ID NO: 460 and SEQ ID NO: 461, SEQ ID NO: 462 and SEQ ID NO: 463, SEQ ID NO: 464 and SEQ ID NO: 465, SEQ ID NO: 466 and SEQ ID NO: 467, SEQ ID NO: 468 and SEQ ID NO: 469, SEQ ID NO: 470 and SEQ ID NO: 471, SEQ ID NO: 472 and SEQ ID NO: 473, SEQ ID NO: 474 and SEQ ID NO: 475, SEQ ID NO: 476 and SEQ ID NO: 477, SEQ ID NO: 478 and SEQ ID NO: 479, SEQ ID NO: 480 and SEQ ID NO: 481, SEQ ID NO: 482 and SEQ ID NO: 483, SEQ ID NO: 484 and SEQ ID NO: 485, SEQ ID NO: 486 and SEQ ID NO: 487, SEQ ID NO: 488 and SEQ ID NO: 489, SEQ ID NO: 490 and SEQ ID NO: 491, SEQ ID NO: 492 and SEQ ID NO: 493, SEQ ID NO: 494 and SEQ ID NO: 495, SEQ ID NO: 496 and SEQ ID NO: 497, SEQ ID NO: 498 and SEQ ID NO: 499, SEQ ID NO: 500 and SEQ ID NO: 501, SEQ ID NO: 502 and SEQ ID NO: 503, SEQ ID NO: 504 and SEQ ID NO: 505, SEQ ID NO: 506 and SEQ ID NO: 507, SEQ ID NO: 508 and SEQ ID NO: 509, SEQ ID NO: 628 and SEQ ID NO: 629, SEQ ID NO: 632 and SEQ ID NO: 633, SEQ ID NO: 634 and SEQ ID NO: 635, SEQ ID NO: 636 and SEQ ID NO: 637, SEQ ID NO: 638 and SEQ ID NO: 639, SEQ ID NO: 640 and SEQ ID NO: 641, SEQ ID NO: 642 and SEQ ID NO: 643, SEQ ID NO: 644 and SEQ ID NO: 645, SEQ ID NO: 646 and SEQ ID NO: 647, SEQ ID NO: 648 and SEQ ID NO: 649, SEQ ID NO: 650 and SEQ ID NO: 651, or SEQ ID NO: 652 and SEQ ID NO: 653, respectively, with zero, one, or two single amino acid substitutions in one or more HCDRs or LCDRs. In some embodiments, the HCDR1, HCDR2, HCDR3, LCDR1, LCDR2, and LCDR3 of the multimeric binding molecule include the CDRs of an antibody that includes the VH and VL of SEQ ID NO: 88 and SEQ ID NO: 89. In some embodiments, the HCDR1, HCDR2, HCDR3, LCDR1, LCDR2, and LCDR3 of the multimeric binding molecule include the CDRs of an antibody that includes the VH and VL of SEQ ID NO: 260 and SEQ ID NO: 261. In some embodiments, the HCDR1, HCDR2, HCDR3, LCDR1, LCDR2, and LCDR3 of the multimeric binding molecule include the CDRs of an antibody that includes the VH and VL of SEQ ID NO: 264 and SEQ ID NO: 265. In some embodiments, the HCDR1, HCDR2, HCDR3, LCDR1, LCDR2, and LCDR3 of the multimeric binding molecule include the CDRs of an antibody that includes the VH and VL of SEQ ID NO: 266 and SEQ ID NO: 267. In some embodiments, the HCDR1, HCDR2, HCDR3, LCDR1, LCDR2, and LCDR3 of the multimeric binding molecule include the CDRs of an antibody that includes the VH and VL of SEQ ID NO: 274 and SEQ ID NO: 275, SEQ ID NO: 278, and SEQ ID NO: 279, SEQ ID NO: 280 and SEQ ID NO: 281, or SEQ ID NO: 282 and SEQ ID NO: 283. In some embodiments, the HCDR1, HCDR2, HCDR3, LCDR1, LCDR2, and LCDR3 of the multimeric binding molecule include the CDRs of an antibody that includes the VH and VL of SEQ ID NO: 292 and SEQ ID NO: 293. In some embodiments, the VH and VL of the multimeric binding molecule described herein include amino acid sequences at least 80%, at least 85%, at least 90%, at least 95% or 100% identical to the recited VH and VL amino acid sequences, respectively. In some embodiments a bivalent reference IgG antibody that includes two of the binding domains can neutralize SARS-CoV-2.

[0017] In some embodiments, the three to twelve identical binding domains of the multimeric binding molecule each specifically bind to SARS-CoV-2, and the VH and VL of the multimeric binding molecule include six immunoglobulin complementarity determining regions HCDR1, HCDR2, HCDR3, LCDR1, LCDR2, and LCDR3, where the HCDR1, HCDR2, HCDR3, LCDR1, LCDR2, and LCDR3 include the CDRs of an antibody that includes the VH and VL of SEQ ID NO: 118 and SEQ ID NO: 119, SEQ ID NO: 162 and SEQ ID NO: 163, SEQ ID NO: 222 and SEQ ID NO: 223, SEQ ID NO: 260 and SEQ ID NO: 261, SEQ ID NO: 296 and SEQ ID NO: 297, SEQ ID NO: 384 and SEQ ID NO: 385, SEQ ID NO: 628 and SEQ ID NO: 629, SEQ ID NO: 632 and SEQ ID NO: 633, SEQ ID NO: 634 and SEQ ID NO: 635, SEQ ID NO: 636 and SEQ ID NO: 637, SEQ ID NO: 638 and SEQ ID NO: 639, SEQ ID NO: 640 and SEQ ID NO: 641, SEQ ID NO: 642 and SEQ ID NO: 643, SEQ ID NO: 644 and SEQ ID NO: 645, or SEQ ID NO: 646 and SEQ ID NO: 647, respectively. In some embodiments, the VH and VL of the multimeric binding molecule include amino acid sequences at least 80%, at least 85%, at least 90%, at least 95% or 100% identical to the recited VH and VL amino acid sequences, respectively. In some embodiments, a bivalent reference IgG antibody that includes two of the binding domains can neutralize SARS-CoV-2, and specifically binds to SARS-CoV.

[0018] In some embodiments, the VH and VL of the multimeric binding molecule include six immunoglobulin complementarity determining regions HCDR1, HCDR2, HCDR3, LCDR1, LCDR2, and LCDR3, and where the HCDR1, HCDR2, HCDR3, LCDR1, LCDR2, and LCDR3 include the CDRs of an antibody that includes the VH and VL of SEQ ID NO: 260 and SEQ ID NO: 261, SEQ ID NO: 296 and SEQ ID NO: 297, SEQ ID NO: 384 and SEQ ID NO: 385, SEQ ID NO: 628 and SEQ ID NO: 629, SEQ ID NO: 632 and SEQ ID NO: 633, SEQ ID NO: 634 and SEQ ID NO: 635, SEQ ID NO: 636 and SEQ ID NO: 637, SEQ ID NO: 638 and SEQ ID NO: 639, SEQ ID NO: 640 and SEQ ID NO: 641, SEQ ID NO: 642 and SEQ ID NO: 643, SEQ ID NO: 644 and SEQ ID NO: 645, or SEQ ID NO: 646 and SEQ ID NO: 647, respectively. In certain embodiments, the VH and VL include the CDRs of an antibody that includes the VH and VL of SEQ ID NO:384 and SEQ ID NO: 385. In certain embodiments, the VH and VL include the CDRs of an antibody that includes the VH and VL of SEQ ID NO: 646 and SEQ ID NO: 647. In some of these embodiments, the VH and VL of the multimeric binding molecule include amino acid sequences at least 80%, at least 85%, at least 90%, at least 95% or 100% identical to the recited VH and VL amino acid sequences, respectively. In some embodiments, a bivalent reference IgG antibody that includes two of the binding domains can neutralize SARS-CoV and SARS-CoV-2.

[0019] In some embodiments, the three to twelve identical binding domains of the multimeric binding molecule each specifically bind to SARS-CoV-2 and each include a single domain variable region (VHH), where the VHH includes three immunoglobulin complementarity determining regions HCDR1, HCDR2, and HCDR3, where the HCDR1, HCDR2, and HCDR3 include the CDRs of an antibody that includes the VHH of SEQ ID NO: SEQ ID NO: 19, SEQ ID NO: 20, SEQ ID NO: 21, SEQ ID NO: 22, SEQ ID NO: 23, SEQ ID NO: 24, SEQ ID NO: 25, SEQ ID NO: 26, SEQ ID NO: 27, SEQ ID NO: 28, SEQ ID NO: 29, SEQ ID NO: 30, SEQ ID NO: 31, SEQ ID NO: 32, SEQ ID NO: 33, SEQ ID NO: 34, SEQ ID NO: 35, SEQ ID NO: 36, SEQ ID NO: 37, SEQ ID NO: 38, SEQ ID NO: 39, SEQ ID NO: 40, SEQ ID NO: 41, SEQ ID NO: 42, SEQ ID NO: 43, SEQ ID NO: 44, SEQ ID NO: 45, SEQ ID NO: 46, SEQ ID NO: 47, SEQ ID NO: 48, SEQ ID NO: 49, SEQ ID NO: 50, SEQ ID NO: 51, SEQ ID NO: 52, SEQ ID NO: 53, SEQ ID NO: 54, SEQ ID NO: 55, SEQ ID NO: 56, SEQ ID NO: 57, SEQ ID NO: 58, SEQ ID NO: 59, SEQ ID NO: 60, SEQ ID NO: 61, SEQ ID NO: 62, SEQ ID NO: 63, SEQ ID NO: 64, SEQ ID NO: 65, SEQ ID NO: 66, SEQ ID NO: 67, SEQ ID NO: 68, SEQ ID NO: 69, SEQ ID NO: 70, SEQ ID NO: 71, SEQ ID NO: 72, SEQ ID NO: 73, SEQ ID NO: 74, SEQ ID NO: 75, SEQ ID NO: 76, SEQ ID NO: 77, SEQ ID NO: 78, SEQ ID NO: 79, SEQ ID NO: 80, SEQ ID NO: 81, SEQ ID NO: 82, or SEQ ID NO:83, with zero, one, or two single amino acid substitutions in one or more of the HCDRs. In some embodiments, the VHH of the multimeric binding molecule includes an amino acid sequence at least 80%, at least 85%, at least 90%, at least 95% or 100% identical to the recited VHH amino acid sequence.

[0020] In some embodiments, the three to twelve identical binding domains of the multimeric binding molecule as described herein specifically bind to a human coronavirus that includes an extracellular SARS-CoV-2 RBD-binding fragment of angiotensin-converting enzyme 2 (ACE2).

[0021] In some embodiments, the three to twelve identical binding domains of the multimeric binding molecule as described herein each specifically bind to SARS-CoV and include a heavy chain variable region (VH) and a light chain variable region (VL), where the VH and VL include six immunoglobulin complementarity determining regions HCDR1, HCDR2, HCDR3, LCDR1, LCDR2, and LCDR3, and where the HCDR1, HCDR2, HCDR3, LCDR1, LCDR2, and LCDR3 include the CDRs of an antibody that includes the VH and VL SEQ ID NO: 84 and SEQ ID NO: 85, SEQ ID NO: 118 and SEQ ID NO: 119, SEQ ID NO: 120 and SEQ ID NO: 121, SEQ ID NO: 138 and SEQ ID NO: 139, SEQ ID NO: 162 and SEQ ID NO: 163, SEQ ID NO: 222 and SEQ ID NO: 223, SEQ ID NO: 236 and SEQ ID NO: 237, SEQ ID NO: 252 and SEQ ID NO: 253, SEQ ID NO: 260 and SEQ ID NO: 261, SEQ ID NO: 262 and SEQ ID NO: 263, SEQ ID NO: 296 and SEQ ID NO: 297, SEQ ID NO: 628 and SEQ ID NO: 629, SEQ ID NO: 632 and SEQ ID NO: 633, SEQ ID NO: 634 and SEQ ID NO: 635, SEQ ID NO: 636 and SEQ ID NO: 637, SEQ ID NO: 638 and SEQ ID NO: 639, SEQ ID NO: 640 and SEQ ID NO: 641, SEQ ID NO: 642 and SEQ ID NO: 643, or SEQ ID NO: 644 and SEQ ID NO: 645. In some embodiments, the VH and VL of the multimeric binding molecule include amino acid sequences at least 80%, at least 85%, at least 90%, at least 95% or 100% identical to the recited VH and VL amino acid sequences, respectively.

[0022] In certain embodiments, the VH and VL of the multimeric binding molecule include six immunoglobulin complementarity determining regions HCDR1, HCDR2, HCDR3, LCDR1, LCDR2, and LCDR3, where the HCDR1, HCDR2, HCDR3, LCDR1, LCDR2, and LCDR3 include the CDRs of an antibody that includes the VH and VL of SEQ ID NO: 84 and SEQ ID NO: 85, SEQ ID NO: 260 and SEQ ID NO: 261, SEQ ID NO: 262 and SEQ ID NO: 263, SEQ ID NO: 296 and SEQ ID NO: 297, SEQ ID NO: 628 and SEQ ID NO: 629, SEQ ID NO: 632 and SEQ ID NO: 633, SEQ ID NO: 634 and SEQ ID NO: 635, SEQ ID NO: 636 and SEQ ID NO: 637, SEQ ID NO: 638 and SEQ ID NO: 639, SEQ ID NO: 640 and SEQ ID NO: 641, SEQ ID NO: 642 and SEQ ID NO: 643, or SEQ ID NO: 644 and SEQ ID NO: 645. In some embodiments, the VH and VL of the multimeric binding molecule include amino acid sequences at least 80%, at least 85%, at least 90%, at least 95% or 100% identical to the recited VH and VL amino acid sequences, respectively. In some embodiments the bivalent reference IgG antibody that includes two of the binding domains can neutralize SARS-CoV.

[0023] In some embodiments, the three to twelve identical binding domains of the multimeric binding molecule each specifically bind to MERS-CoV and include a heavy chain variable region (VH) and a light chain variable region (VL), where the VH and VL include six immunoglobulin complementarity determining regions HCDR1, HCDR2, HCDR3, LCDR1, LCDR2, and LCDR3, and where the HCDR1, HCDR2, HCDR3, LCDR1, LCDR2, and LCDR3 include the CDRs of an antibody that includes the VH and VL SEQ ID NO:510 and SEQ ID NO:511, SEQ ID NO:512 and SEQ ID NO:513, SEQ ID NO:514 and SEQ ID NO:515, SEQ ID NO:516 and SEQ ID NO:517, SEQ ID NO:518 and SEQ ID NO:519, SEQ ID NO:520 and SEQ ID NO:521, SEQ ID NO:522 and SEQ ID NO:523, SEQ ID NO:524 and SEQ ID NO:525, SEQ ID NO:526 and SEQ ID NO:527, SEQ ID NO:528 and SEQ ID NO:529, SEQ ID NO:530 and SEQ ID NO:531, SEQ ID NO:532 and SEQ ID NO:533, SEQ ID NO:534 and SEQ ID NO:535, SEQ ID NO:536 and SEQ ID NO:537, SEQ ID NO:538 and SEQ ID NO:539, SEQ ID NO:540 and SEQ ID NO:541, SEQ ID NO:542 and SEQ ID NO:543, SEQ ID NO:544 and SEQ ID NO:545, SEQ ID NO:546 and SEQ ID NO:547, SEQ ID NO:548 and SEQ ID NO:549, SEQ ID NO:550 and SEQ ID NO:551, SEQ ID NO:552 and SEQ ID NO:553, SEQ ID NO:554 and SEQ ID NO:555, SEQ ID NO:556 and SEQ ID NO:557, SEQ ID NO:558 and SEQ ID NO:559, SEQ ID NO:560 and SEQ ID NO:561, SEQ ID NO:562 and SEQ ID NO:563, SEQ ID NO:564 and SEQ ID NO:565, SEQ ID NO:566 and SEQ ID NO:567, SEQ ID NO:568 and SEQ ID NO:569, SEQ ID NO:570 and SEQ ID NO:571, SEQ ID NO:572 and SEQ ID NO:573, SEQ ID NO:574 and SEQ ID NO:575, SEQ ID NO:576 and SEQ ID NO:577, SEQ ID NO:578 and SEQ ID NO:579, SEQ ID NO:580 and SEQ ID NO:581, SEQ ID NO:582 and SEQ ID NO:583, SEQ ID NO:584 and SEQ ID NO:585, SEQ ID NO:586 and SEQ ID NO:587, SEQ ID NO:588 and SEQ ID NO:589, SEQ ID NO:590 and SEQ ID NO:591, SEQ ID NO:592 and SEQ ID NO:593, SEQ ID NO:594 and SEQ ID NO:595, SEQ ID NO:596 and SEQ ID NO:597, SEQ ID NO:598 and SEQ ID NO:599, SEQ ID NO:600 and SEQ ID NO:601, SEQ ID NO:602 and SEQ ID NO:603, SEQ ID NO:604 and SEQ ID NO:605, SEQ ID NO:606 and SEQ ID NO:607, SEQ ID NO:608 and SEQ ID NO:609, SEQ ID NO:610 and SEQ ID NO:611, SEQ ID NO:612 and SEQ ID NO:613, SEQ ID NO:614 and SEQ ID NO:615, SEQ ID NO:616 and SEQ ID NO:617, SEQ ID NO:618 and SEQ ID NO:619, SEQ ID NO:620 and SEQ ID NO:621, SEQ ID NO:622 and SEQ ID NO:623, SEQ ID NO:624 and SEQ ID NO:625, SEQ ID NO:626 and SEQ ID NO:627, or SEQ ID NO:630 and SQ ID NO:631, respectively, with zero, one, or two single amino acid substitutions in one or more of the HCDRs or LCDRs. In some embodiments, the VH and VL of the multimeric binding molecule include amino acid sequences at least 80%, at least 85%, at least 90%, at least 95% or 100% identical to the recited VH and VL amino acid sequences, respectively.

[0024] In some embodiments, the HCDR1, HCDR2, HCDR3, LCDR1, LCDR2, and LCDR3 of the multimeric binding molecule include the CDRs of an antibody that includes the VH and VL of SEQ ID NO: 510 and SEQ ID NO: 511, SEQ ID NO: 512 and SEQ ID NO: 513, SEQ ID NO: 514 and SEQ ID NO: 515, SEQ ID NO: 516 and SEQ ID NO: 517, SEQ ID NO: 518 and SEQ ID NO: 519, SEQ ID NO: 520 and SEQ ID NO: 521, SEQ ID NO: 522 and SEQ ID NO: 523, SEQ ID NO: 524 and SEQ ID NO: 525, SEQ ID NO: 526 and SEQ ID NO: 527, SEQ ID NO: 528 and SEQ ID NO: 529, SEQ ID NO: 530 and SEQ ID NO: 531, SEQ ID NO: 532 and SEQ ID NO: 533, SEQ ID NO: 534 and SEQ ID NO: 535, SEQ ID NO: 536 and SEQ ID NO: 537, SEQ ID NO: 538 and SEQ ID NO: 539, SEQ ID NO: 540 and SEQ ID NO: 541, SEQ ID NO: 542 and SEQ ID NO: 543, SEQ ID NO: 544 and SEQ ID NO: 545, SEQ ID NO: 546 and SEQ ID NO: 547, SEQ ID NO: 548 and SEQ ID NO: 549, SEQ ID NO: 550 and SEQ ID NO: 551, SEQ ID NO: 552 and SEQ ID NO: 553, SEQ ID NO: 554 and SEQ ID NO: 555, SEQ ID NO: 556 and SEQ ID NO: 557, SEQ ID NO: 558 and SEQ ID NO: 559, SEQ ID NO: 560 and SEQ ID NO: 561, SEQ ID NO: 562 and SEQ ID NO: 563, SEQ ID NO: 564 and SEQ ID NO: 565, SEQ ID NO: 566 and SEQ ID NO: 567, SEQ ID NO: 568 and SEQ ID NO: 569, SEQ ID NO: 574 and SEQ ID NO: 575, SEQ ID NO: 576 and SEQ ID NO: 577, SEQ ID NO: 578 and SEQ ID NO: 579, SEQ ID NO: 580 and SEQ ID NO: 581, SEQ ID NO: 582 and SEQ ID NO: 583, SEQ ID NO: 584 and SEQ ID NO: 585, SEQ ID NO: 586 and SEQ ID NO: 587, SEQ ID NO: 588 and SEQ ID NO: 589, SEQ ID NO: 590 and SEQ ID NO: 591, SEQ ID NO: 592 and SEQ ID NO: 593, SEQ ID NO: 594 and SEQ ID NO: 595, SEQ ID NO: 596 and SEQ ID NO: 597, SEQ ID NO: 598 and SEQ ID NO: 599, SEQ ID NO: 600 and SEQ ID NO: 601, SEQ ID NO: 602 and SEQ ID NO: 603, SEQ ID NO: 604 and SEQ ID NO: 605, SEQ ID NO: 606 and SEQ ID NO: 607, SEQ ID NO: 608 and SEQ ID NO: 609, SEQ ID NO: 610 and SEQ ID NO: 611, SEQ ID NO: 612 and SEQ ID NO: 613, SEQ ID NO: 614 and SEQ ID NO: 615, SEQ ID NO: 616 and SEQ ID NO: 617, SEQ ID NO: 618 and SEQ ID NO: 619, SEQ ID NO: 620 and SEQ ID NO: 621, SEQ ID NO: 622 and SEQ ID NO: 623, SEQ ID NO: 624 and SEQ ID NO: 625, SEQ ID NO: 626 and SEQ ID NO: 627, or SEQ ID NO: 630 and SEQ ID NO: 631, respectively. In some embodiments, the HCDR1, HCDR2, HCDR3, LCDR1, LCDR2, and LCDR3 of the multimeric binding molecule include the CDRs of an antibody that includes the VH and VL of SEQ ID NO: 630 and SEQ ID NO: 631, respectively. In some of these embodiments, the VH and VL of the multimeric binding molecule include amino acid sequences at least 80%, at least 85%, at least 90%, at least 95% or 100% identical to the recited VH and VL amino acid sequences, respectively. In some of these embodiments, the bivalent reference IgG antibody that includes two of the binding domains can neutralize MERS-CoV.

[0025] In some embodiments, the three to twelve identical binding domains of the multimeric binding molecule include an extracellular MERS-CoV RBD-binding fragment of dipeptidyl peptidase 4 (DPP4).

[0026] In some embodiments the multimeric binding molecule can neutralize escape mutants of a bivalent reference IgG antibody that includes two of the binding domains.

[0027] In some embodiments, the multimeric binding molecule includes two or four bivalent IgA or IgA-like binding units and a J chain or functional fragment or variant thereof, where each binding unit includes two IgA heavy chain constant regions or multimerizing fragments or variants thereof, each including an IgA Cα3 domain and an IgA tailpiece domain. In some embodiments, the multimeric binding molecule is a dimeric binding molecule that includes two bivalent IgA or IgA-like binding units. In some embodiments, each IgA heavy chain constant region or multimerizing fragment or variant thereof further includes a Cα1 domain, a Cα2 domain, an IgA hinge region, or any combination thereof. In some embodiments, the IgA heavy chain constant regions or multimerizing fragments or variants thereof are human IgA constant regions. In some embodiments, each binding unit of the multimeric binding molecule includes two IgA heavy chains each including a VH situated amino terminal to the IgA constant region or multimerizing fragment thereof, and two immunoglobulin light chains each including a VL situated amino terminal to an immunoglobulin light chain constant region.

[0028] In some embodiments, the multimeric binding molecule includes five or six bivalent IgM or IgM-like binding units, where each binding unit includes two IgM heavy chain constant regions or multimerizing fragments or variants thereof, each including an IgM Cμ4 and IgM tailpiece domain. In some embodiments, each IgM heavy chain constant region or multimerizing fragment or variant thereof of the multimeric binding molecule further includes a Cμ1 domain, a Cμ2 domain, a Cμ3 domain, or any combination thereof. In some of these embodiments, the IgM heavy chain constant regions or multimerizing fragments or variants thereof are human IgM constant regions. In some embodiments, the IgM heavy chain constant regions each include the amino acid sequence SEQ ID NO: 1, SEQ ID NO: 2, or a multimerizing fragment or variant thereof. In some embodiments, each binding unit of the multimeric binding molecule includes two IgM heavy chains, each including a VH situated amino terminal to the IgM constant region or fragment thereof, and two immunoglobulin light chains, each including a VL situated amino terminal to an immunoglobulin light chain constant region.

[0029] In some embodiments the IgM constant regions of the multimeric binding molecule each include one or more amino acid substitutions corresponding to a wild-type human IgM constant region at position 310, 311, 313, and/or 315 of SEQ ID NO: 1 or SEQ ID NO: 2, and the multimeric binding molecule exhibits reduced complement-dependent cytotoxicity (CDC) activity to cells in the presence of complement, relative to a reference binding molecule that is identical except for the one or more amino acid substitutions. In some embodiments, the IgM constant regions of the multimeric binding molecule each include one or more substitutions corresponding to a wild-type human IgM constant region at positions 46, 209, 272, or 440 of SEQ ID NO: 1 or SEQ ID NO: 2, where the one or more amino acid substitutions prevent asparagine (N)-linked glycosylation. In some of these embodiments, the multimeric binding molecule is pentameric, and further includes a J-chain or functional fragment or variant thereof. In some embodiments, the multimeric binding molecule can transport across vascular endothelial cells via J-chain binding to the polymeric Ig receptor (PIgR). In some embodiments, the multimeric binding molecule further includes a secretory component, or fragment or variant thereof.

[0030] In some embodiments the J-chain or functional fragment or variant thereof the multimeric binding molecule that includes five or six bivalent IgM or IgM-like binding units further includes a heterologous polypeptide, where the heterologous polypeptide is directly or indirectly fused to the J-chain or functional fragment or variant thereof. In some embodiments, the heterologous polypeptide is fused to the J-chain or fragment thereof via a peptide linker. In some embodiments, the peptide linker includes at least 5 amino acids, but no more than 25 amino acids. In some embodiments, the peptide linker consists of the amino acid sequence GGGGS (SEQ ID NO: 9), GGGGSGGGGS (SEQ ID NO: 10), GGGGSGGGGSGGGGS (SEQ ID NO: 11), GGGGSGGGGSGGGGSGGGGS (SEQ ID NO: 12), or GGGGSGGGGSGGGGSGGGGSGGGGS (SEQ ID NO: 13).

[0031] In some embodiments, the heterologous polypeptide of the multimeric binding molecule that includes five or six bivalent IgM or IgM-like binding units is fused to the N-terminus of the J-chain or fragment or variant thereof, the C-terminus of the J-chain or fragment or variant thereof, or to both the N-terminus and C-terminus of the J-chain or fragment or variant thereof.

[0032] In some embodiments, the heterologous polypeptide of the multimeric binding molecule that includes five or six bivalent IgM or IgM-like binding units can influence the absorption, distribution, metabolism and/or excretion (ADME) of the multimeric binding molecule. In some embodiments, the heterologous polypeptide includes an albumin or an albumin binding domain, human serum albumin, or an antigen binding domain. In some embodiments, the antigen binding domain binds to the human coronavirus. In some embodiments, the antigen binding domain binds to a different epitope of the human coronavirus than the three to twelve identical binding domains of the multimeric binding molecule that specifically bind to the human coronavirus. In some embodiments, the antigen binding domain of the heterologous polypeptide is an antibody or antigen-binding fragment thereof. In some of these embodiments, the antigen-binding fragment includes a Fab fragment, a Fab′ fragment, a F(ab′)2 fragment, a Fd fragment, a Fv fragment, a single-chain Fv (scFv) fragment, a disulfide-linked Fv (sdFv) fragment, or any combination thereof. In some embodiments, the antigen-binding fragment is a scFv fragment. In some embodiments, the heterologous polypeptide includes an extracellular SARS-CoV-2 RBD-binding fragment of angiotensin-converting enzyme 2 (ACE2). In some embodiments, the heterologous polypeptide includes an extracellular MERS-COV RBD-binding fragment of dipeptidyl peptidase 4 (DPP4).

[0033] In some embodiments, the J-chain or functional fragment or variant thereof of the multimeric binding molecule that includes five or six bivalent IgM or IgM-like binding units further includes an additional heterologous polypeptide, where the additional heterologous polypeptide is directly or indirectly fused to the J-chain or functional fragment or variant thereof. In some embodiments, the additional heterologous polypeptide can influence the absorption, distribution, metabolism and/or excretion (ADME) of the multimeric binding molecule. In some embodiments, the additional heterologous polypeptide includes an albumin, an albumin binding protein, or human serum albumin.

[0034] Some embodiments of the disclosure are directed to a composition that includes a multimeric binding molecule as described herein. In some embodiments, the composition includes two or more nonidentical multimeric binding molecules as described herein, where the two or more multimeric binding molecules bind to different epitopes of a single human coronavirus.

[0035] Some embodiments of the disclosure are directed to a polynucleotide that includes a nucleic acid sequence that encodes a polypeptide subunit of the binding molecule described herein.

[0036] Some embodiments of the disclosure are directed to a vector that includes the polynucleotide as described herein.

[0037] Some embodiments of the disclosure are directed to a host cell that includes a polynucleotide of the disclosure, or a vector of the disclosure, where the host cell can express a multimeric binding molecule as described herein.

[0038] Some embodiments of the disclosure relate to methods of producing a multimeric binding molecule as described herein, which includes culturing a host cell as described herein, and recovering the multimeric binding molecule. In some embodiments, the method further includes contacting the multimeric binding molecule with a secretory component, or fragment or variant thereof.

[0039] Some embodiments as described herein are directed to a method for treating a human coronavirus disease in a subject in need of treatment that includes administering to the subject an effective amount of a multimeric binding molecule as described herein, where the multimeric binding molecule exhibits greater potency than an equivalent amount of a bivalent reference IgG antibody that includes two of the binding domains that specifically bind to the human coronavirus. In some embodiments the human coronavirus disease is coronavirus disease 2019 (COVID-19). In some embodiments, the human coronavirus disease is Middle East Respiratory Syndrome (MERS). In some methods, the subject is human. In some embodiments, the method includes intravenous, subcutaneous, intramuscular, intranasal, and/or inhalation administration of a multimeric binding molecule as described herein.

[0040] Some embodiments of the disclosure are directed to a method for preventing a human coronavirus disease in a subject, which includes administering to the subject an effective amount of a multimeric binding molecule as described herein, where the multimeric binding molecule exhibits greater potency than an equivalent amount of a bivalent reference IgG antibody that includes two of the binding domains that specifically bind to the human coronavirus. In some embodiments the human coronavirus disease is coronavirus disease 2019 (COVID-19). In some embodiments, the human coronavirus disease is Middle East Respiratory Syndrome (MERS). In some methods, the subject is human. In some embodiments, the method includes intravenous, subcutaneous, intramuscular, intranasal, and/or inhalation administration of a multimeric binding molecule as described herein.

### BRIEF DESCRIPTION OF THE DRAWINGS/FIGURES

[0041] FIGS. 1A-1B show binding of CR3022 IgM, IgA1, IgA2m2, and IgG to SARS-CoV-1 (FIG. 1A) or SARS-CoV-2 (FIG. 1B) receptor binding domain (RBD) in an ELISA assay.

[0042] FIGS. 2A-2F show the percent inhibition of SARS-CoV-1 pseudovirus by CR3022 IgG1 (FIG. 2A), CR3022 IgA1 (FIG. 2B), CR3022 IgA2m2 (FIG. 2C), CR3022 IgM (FIG. 2D), CR3014 IgG1 (FIG. 2E), and CR3014 IgM (FIG. 2F). The half maximal inhibitory concentration (IC₅₀) is denoted by a dashed line.

[0043] FIG. 3 shows the concentration of IgG, IgA1, IgA2m2, and IgM in the apical chamber following pIgR-mediated transcytosis.

[0044] FIGS. 4A-4G show binding to SARS-CoV-2 receptor binding domain (RBD) (FIGS. 4A-4D) of IgM or IgG Ab1 (FIG. 4A), IgM or IgG Ab2 (FIG. 4B), IgM or IgG Ab3 (FIG. 4C), IgM or IgG Ab4 (FIG. 4D), IgM or IgG Ab10 (FIG. 4E), IgM or IgG Ab11 (FIG. 4F), and IgM or IgG Ab13 (FIG. 4G) in an ELISA assay.

[0045] FIGS. 5A-5D show the percent neutralization of SARS-CoV-2 by IgM or IgG Ab10 (FIG. 5A), IgM or IgG Ab11 (FIG. 5B), IgM or IgG Ab12 (FIG. 5C), IgM or IgG Ab13 (FIG. 5D). The half maximal inhibitory concentration (IC₅₀) is denoted by a dashed line.

[0046] FIGS. 6A-6L show the percent neutralization of SARS-CoV-2 pseudovirus by IgM or IgG Ab1 (FIG. 6A), IgM or IgG Ab2 (FIG. 6B), IgM or IgG Ab3 (FIG. 6C), IgM or IgG Ab4 (FIG. 6D), IgM or IgG Ab5 (FIG. 6E), IgM or IgG Ab6 (FIG. 6F), IgM or IgG Ab7 (FIG. 6G), IgM or IgG Ab8 (FIG. 6H), IgM or IgG Ab10 (FIG. 6I), IgM or IgG Ab11 (FIG. 6J), IgM or IgG Ab12 (FIG. 6K), or IgM or IgG Ab13 (FIG. 6L).

### DETAILED DESCRIPTION

### Definitions

[0047] As used herein, the term “a” or “an” entity refers to one or more of that entity; for example, “a binding molecule,” is understood to represent one or more binding molecules. As such, the terms “a” (or “an”), “one or more,” and “at least one” can be used interchangeably herein.

[0048] Furthermore, “and/or” where used herein is to be taken as specific disclosure of each of the two specified features or components with or without the other. Thus, the term and/or” as used in a phrase such as “A and/or B” herein is intended to include “A and B,” “A or B,” “A” (alone), and “B” (alone). Likewise, the term “and/or” as used in a phrase such as “A, B, and/or C” is intended to encompass each of the following embodiments: A, B, and C; A, B, or C; A or C; A or B; B or C; A and C; A and B; B and C; A (alone); B (alone); and C (alone).

[0049] Unless defined otherwise, technical and scientific terms used herein have the same meaning as commonly understood by one of ordinary skill in the art to which this disclosure is related. For example, the Concise Dictionary of Biomedicine and Molecular Biology, Juo, Pei-Show, 2nd ed., 2002, CRC Press; The Dictionary of Cell and Molecular Biology, 3rd ed., 1999, Academic Press; and the Oxford Dictionary of Biochemistry and Molecular Biology, Revised, 2000, Oxford University Press, provide one of skill with a general dictionary of many of the terms used in this disclosure.

[0050] Units, prefixes, and symbols are denoted in their Systeme International de Unites (SI) accepted form. Numeric ranges are inclusive of the numbers defining the range. Unless otherwise indicated, amino acid sequences are written left to right in amino to carboxy orientation. The headings provided herein are not limitations of the various embodiments or embodiments of the disclosure, which can be had by reference to the specification as a whole. Accordingly, the terms defined immediately below are more fully defined by reference to the specification in its entirety.

[0051] As used herein, the term “polypeptide” is intended to encompass a singular “polypeptide” as well as plural “polypeptides,” and refers to a molecule composed of monomers (amino acids) linearly linked by amide bonds (also known as peptide bonds). The term “polypeptide” refers to any chain or chains of two or more amino acids and does not refer to a specific length of the product. Thus, peptides, dipeptides, tripeptides, oligopeptides, “protein,” “amino acid chain,” or any other term used to refer to a chain or chains of two or more amino acids are included within the definition of “polypeptide,” and the term “polypeptide” can be used instead of any of these terms. The term “polypeptide” is also intended to refer to the products of post-expression modifications of the polypeptide, including without limitation glycosylation, acetylation, phosphorylation, amidation, and derivatization by known protecting/blocking groups, proteolytic cleavage, or modification by non-naturally occurring amino acids. A polypeptide can be derived from a biological source or produced by recombinant technology but is not necessarily translated from a designated nucleic acid sequence. It can be generated in any manner, including by chemical synthesis.

[0052] A polypeptide as disclosed herein can be of a size of about 3 or more, 5 or more, 10 or more, 20 or more, 25 or more, 50 or more, 75 or more, 100 or more, 200 or more, 500 or more, 1,000 or more, or 2,000 or more amino acids. Polypeptides can have a defined three-dimensional structure, although they do not necessarily have such structure. Polypeptides with a defined three-dimensional structure are referred to as folded, and polypeptides which do not possess a defined three-dimensional structure, but rather can adopt many different conformations and are referred to as unfolded. As used herein, the term glycoprotein refers to a protein coupled to at least one carbohydrate moiety that is attached to the protein via an oxygen-containing or a nitrogen-containing side chain of an amino acid, e.g., a serine or an asparagine. Asparagine (N)-linked glycans are described in more detail elsewhere in this disclosure.

[0053] By an “isolated” polypeptide or a fragment, variant, or derivative thereof is intended a polypeptide that is not in its natural milieu. No particular level of purification is required. For example, an isolated polypeptide can be removed from its native or natural environment. Recombinantly produced polypeptides and proteins expressed in host cells are considered isolated as disclosed herein, as are native or recombinant polypeptides which have been separated, fractionated, or partially or substantially purified by any suitable technique.

[0054] As used herein, the term “a non-naturally occurring polypeptide” or any grammatical variants thereof, is a conditional definition that explicitly excludes, but only excludes, those forms of the polypeptide that are, or might be, determined or interpreted by a judge or an administrative or judicial body, to be “naturally-occurring.”

[0055] Other polypeptides disclosed herein are fragments, derivatives, analogs, or variants of the foregoing polypeptides, and any combination thereof. The terms “fragment,” “variant,” “derivative” and “analog” as disclosed herein include any polypeptides which retain at least some of the properties of the corresponding native antibody or polypeptide, for example, specifically binding to an antigen. Fragments of polypeptides include, for example, proteolytic fragments, as well as deletion fragments, in addition to specific antibody fragments discussed elsewhere herein. Variants of, e.g., a polypeptide include fragments as described above, and also polypeptides with altered amino acid sequences due to amino acid substitutions, deletions, or insertions. In certain embodiments, variants can be non-naturally occurring. Non-naturally occurring variants can be produced using art-known mutagenesis techniques. Variant polypeptides can comprise conservative or non-conservative amino acid substitutions, deletions, or additions. Derivatives are polypeptides that have been altered so as to exhibit additional features not found on the original polypeptide. Examples include fusion proteins. As used herein a “derivative” of a polypeptide can also refer to a subject polypeptide having one or more amino acids chemically derivatized by reaction of a functional side group. Also included as “derivatives” are those polypeptides that contain one or more derivatives of the twenty standard amino acids. For example, 4-hydroxyproline can be substituted for proline; 5-hydroxylysine can be substituted for lysine; 3-methylhistidine can be substituted for histidine; homoserine can be substituted for serine; and omithine can be substituted for lysine.

[0056] A “conservative amino acid substitution” is one in which one amino acid is replaced with another amino acid having a similar side chain. Families of amino acids having similar side chains have been defined in the art, including basic side chains (e.g., lysine, arginine, histidine), acidic side chains (e.g., aspartic acid, glutamic acid), uncharged polar side chains (e.g., asparagine, glutamine, serine, threonine, tyrosine, cysteine), nonpolar side chains (e.g., glycine, alanine, valine, leucine, isoleucine, proline, phenylalanine, methionine, tryptophan), beta-branched side chains (e.g., threonine, valine, isoleucine) and aromatic side chains (e.g., tyrosine, phenylalanine, tryptophan, histidine). For example, substitution of a phenylalanine for a tyrosine is a conservative substitution. In certain embodiments, conservative substitutions in the sequences of the polypeptides, binding molecules, and antibodies of the present disclosure do not abrogate the binding of the polypeptide, binding molecule, or antibody containing the amino acid sequence, to the antigen to which the antibody binds. Methods of identifying nucleotide and amino acid conservative substitutions which do not eliminate antigen-binding are well-known in the art (see, e.g., Brummell et al., Biochem. 32: 1180-1 187 (1993); Kobayashi et al., Protein Eng. 12:879-884 (1999); and Burks et al., Proc. Natl. Acad. Sci. USA 94: 412-417 (1997)).

[0057] The term “polynucleotide” is intended to encompass a singular nucleic acid as well as plural nucleic acids and refers to an isolated nucleic acid molecule or construct, e.g., messenger RNA (mRNA), cDNA, or plasmid DNA (pDNA). A polynucleotide can comprise a conventional phosphodiester bond or a non-conventional bond (e.g., an amide bond, such as found in peptide nucleic acids (PNA)). The terms “nucleic acid” or “nucleic acid sequence” refer to any one or more nucleic acid segments, e.g., DNA or RNA fragments, present in a polynucleotide.

[0058] By an “isolated” nucleic acid or polynucleotide is intended any form of the nucleic acid or polynucleotide that is separated from its native environment. For example, gel-purified polynucleotide, or a recombinant polynucleotide encoding a polypeptide contained in a vector would be considered to be “isolated.” Also, a polynucleotide segment, e.g., a PCR product, which has been engineered to have restriction sites for cloning is considered to be “isolated.” Further examples of an isolated polynucleotide include recombinant polynucleotides maintained in heterologous host cells or purified (partially or substantially) polynucleotides in a non-native solution such as a buffer or saline. Isolated RNA molecules include in vivo or in vitro RNA transcripts of polynucleotides, where the transcript is not one that would be found in nature. Isolated polynucleotides or nucleic acids further include such molecules produced synthetically. In addition, polynucleotide or a nucleic acid can be or can include a regulatory element such as a promoter, ribosome binding site, or a transcription terminator.

[0059] As used herein, the term “a non-naturally occurring polynucleotide” or any grammatical variants thereof, is a conditional definition that explicitly excludes, but only excludes, those forms of the nucleic acid or polynucleotide that are, or might be, determined or interpreted by a judge, or an administrative or judicial body, to be “naturally-occurring.”

[0060] As used herein, a “coding region” is a portion of nucleic acid which consists of codons translated into amino acids. Although a “stop codon” (TAG, TGA, or TAA) is not translated into an amino acid, it can be considered to be part of a coding region, but any flanking sequences, for example promoters, ribosome binding sites, transcriptional terminators, introns, and the like, are not part of a coding region. Two or more coding regions can be present in a single polynucleotide construct, e.g., on a single vector, or in separate polynucleotide constructs, e.g., on separate (different) vectors. Furthermore, any vector can contain a single coding region, or can comprise two or more coding regions, e.g., a single vector can separately encode an immunoglobulin heavy chain variable region and an immunoglobulin light chain variable region. In addition, a vector, polynucleotide, or nucleic acid can include heterologous coding regions, either fused or unfused to another coding region. Heterologous coding regions include without limitation, those encoding specialized elements or motifs, such as a secretory signal peptide or a heterologous functional domain.

[0061] In certain embodiments, the polynucleotide or nucleic acid is DNA. In the case of DNA, a polynucleotide comprising a nucleic acid which encodes a polypeptide normally can include a promoter and/or other transcription or translation control elements operably associated with one or more coding regions. An operable association is when a coding region for a gene product, e.g., a polypeptide, is associated with one or more regulatory sequences in such a way as to place expression of the gene product under the influence or control of the regulatory sequence(s). Two DNA fragments (such as a polypeptide coding region and a promoter associated therewith) are “operably associated” if induction of promoter function results in the transcription of mRNA encoding the desired gene product and if the nature of the linkage between the two DNA fragments does not interfere with the ability of the expression regulatory sequences to direct the expression of the gene product or interfere with the ability of the DNA template to be transcribed. Thus, a promoter region would be operably associated with a nucleic acid encoding a polypeptide if the promoter was capable of effecting transcription of that nucleic acid. The promoter can be a cell-specific promoter that directs substantial transcription of the DNA in predetermined cells. Other transcription control elements, besides a promoter, for example enhancers, operators, repressors, and transcription termination signals, can be operably associated with the polynucleotide to direct cell-specific transcription.

[0062] A variety of transcription control regions are known to those skilled in the art. These include, without limitation, transcription control regions that function in vertebrate cells, such as, but not limited to, promoter and enhancer segments from cytomegaloviruses (the immediate early promoter, in conjunction with intron A), simian virus 40 (the early promoter), and retroviruses (such as Rous sarcoma virus). Other transcription control regions include those derived from vertebrate genes such as actin, heat shock protein, bovine growth hormone and rabbit β-globin, as well as other sequences capable of controlling gene expression in eukaryotic cells. Additional suitable transcription control regions include tissue-specific promoters and enhancers as well as lymphokine-inducible promoters (e.g., promoters inducible by interferons or interleukins).

[0063] Similarly, a variety of translation control elements are known to those of ordinary skill in the art. These include, but are not limited to ribosome binding sites, translation initiation and termination codons, and elements derived from picornaviruses (particularly an internal ribosome entry site, or IRES, also referred to as a CITE sequence).

[0064] In other embodiments, a polynucleotide can be RNA, for example, in the form of messenger RNA (mRNA), transfer RNA, or ribosomal RNA.

[0065] Polynucleotide and nucleic acid coding regions can be associated with additional coding regions which encode secretory or signal peptides, which direct the secretion of a polypeptide encoded by a polynucleotide as disclosed herein. According to the signal hypothesis, proteins secreted by mammalian cells have a signal peptide or secretory leader sequence which is cleaved from the mature protein once export of the growing protein chain across the rough endoplasmic reticulum has been initiated. Those of ordinary skill in the art are aware that polypeptides secreted by vertebrate cells can have a signal peptide fused to the N-terminus of the polypeptide, which is cleaved from the complete or “full length” polypeptide to produce a secreted or “mature” form of the polypeptide. In certain embodiments, the native signal peptide, e.g., an immunoglobulin heavy chain or light chain signal peptide is used, or a functional derivative of that sequence that retains the ability to direct the secretion of the polypeptide that is operably associated with it. Alternatively, a heterologous mammalian signal peptide, or a functional derivative thereof, can be used. For example, the wild-type leader sequence can be substituted with the leader sequence of human tissue plasminogen activator (TPA) or mouse β-glucuronidase.

[0066] As used herein, the term “binding molecule” refers in its broadest sense to a molecule that specifically binds to a receptor or target, e.g., an epitope or an antigenic determinant. As described further herein, a binding molecule can comprise one of more “binding domains,” e.g., “antigen-binding domains” described herein. A non-limiting example of a binding molecule is an antibody or antibody-like molecule as described in detail herein that retains antigen-specific binding. In certain embodiments a “binding molecule” comprises an antibody or antibody-like or antibody-derived molecule as described in detail herein.

[0067] As used herein, the terms “binding domain” or “antigen-binding domain” (can be used interchangeably) refer to a region of a binding molecule, e.g., an antibody or antibody-like, or antibody-derived molecule, that is necessary and sufficient to specifically bind to a target, e.g., an epitope, a polypeptide, a cell, or an organ. For example, an “Fv,” e.g., a heavy chain variable region and a light chain variable region of an antibody, either as two separate polypeptide subunits or as a single chain, is considered to be a “binding domain.” Other antigen-binding domains include, without limitation, a single domain heavy chain variable region (VHH) of an antibody derived from a camelid species, or six immunoglobulin complementarity determining regions (CDRs) expressed in a fibronectin scaffold. A “binding molecule,” e.g., an “antibody” as described herein can include one, two, three, four, five, six, seven, eight, nine, ten, eleven, twelve, or more “antigen-binding domains.”

[0068] The terms “antibody” and “immunoglobulin” can be used interchangeably herein. An antibody (or a fragment, variant, or derivative thereof as disclosed herein, e.g., an IgM-like antibody) includes at least the variable domain of a heavy chain (e.g., from a camelid species) or at least the variable domains of a heavy chain and a light chain. Basic immunoglobulin structures in vertebrate systems are relatively well understood. See, e.g., Harlow et al., Antibodies: A Laboratory Manual, (Cold Spring Harbor Laboratory Press, 2nd ed. 1988). Unless otherwise stated, the term “antibody” encompasses anything ranging from a small antigen-binding fragment of an antibody to a full sized antibody, e.g., an IgG antibody that includes two complete heavy chains and two complete light chains, an IgA antibody that includes four complete heavy chains and four complete light chains and includes a J-chain and/or a secretory component, or an IgM-derived binding molecule, e.g., an IgM antibody or IgM-like antibody, that includes ten or twelve complete heavy chains and ten or twelve complete light chains and optionally includes a J-chain or functional fragment or variant thereof.

[0069] The term “immunoglobulin” comprises various broad classes of polypeptides that can be distinguished biochemically. Those skilled in the art will appreciate that heavy chains are classified as gamma, mu, alpha, delta, or epsilon, (γ, μ, α, δ, ε) with some subclasses among them (e.g., γ1-γ4 or α1-α2)). It is the nature of this chain that determines the “isotype” of the antibody as IgG, IgM, IgA IgD, or IgE, respectively. The immunoglobulin subclasses (subtypes) e.g., IgG₁, IgG₂, IgG₃, IgG₄, IgA₁, IgA₂, etc. are well characterized and are known to confer functional specialization. Modified versions of each of these immunoglobulins are readily discernible to the skilled artisan in view of the instant disclosure and, accordingly, are within the scope of this disclosure.

[0070] Light chains are classified as either kappa or lambda (κ, λ). Each heavy chain class can be bound with either a kappa or lambda light chain. In general, the light and heavy chains are covalently bonded to each other, and the “tail” portions of the two heavy chains are bonded to each other by covalent disulfide linkages or non-covalent linkages when the immunoglobulins are expressed, e.g., by hybridomas, B cells or genetically engineered host cells. In the heavy chain, the amino acid sequences run from an N-terminus at the forked ends of the Y configuration to the C-terminus at the bottom of each chain. The basic structure of certain antibodies, e.g., IgG antibodies, includes two heavy chain subunits and two light chain subunits covalently connected via disulfide bonds to form a “Y” structure, also referred to herein as an “H2L2” structure, or a “binding unit.”

[0071] The term “binding unit” is used herein to refer to the portion of a binding molecule, e.g., an antibody, antibody-like molecule, or antibody-derived molecule, antigen-binding fragment thereof, or multimerizing fragment thereof, which corresponds to a standard “H2L2” immunoglobulin structure, i.e., two heavy chains or fragments thereof and two light chains or fragments thereof. In certain embodiments, e.g., where the binding molecule is a bivalent IgG antibody or antigen-binding fragment thereof, the terms “binding molecule” and “binding unit” are equivalent. Such binding molecules are also referred to herein as “monomeric.” In other embodiments, e.g., where the binding molecule is a “multimeric binding molecule,” e.g., a dimeric or tetrameric IgA antibody, a dimeric or tetrameric IgA-like antibody, a dimeric or tetrameric IgA-derived binding molecule, a pentameric or hexameric IgM antibody, a pentameric or hexameric IgM-like antibody, or a pentameric or hexameric IgM-derived binding molecule or any derivative thereof, the binding molecule comprises two or more “binding units.” Two in the case of an IgA dimer, four in the case of an IgA tetramer, or five or six in the case of an IgM pentamer or hexamer, respectively. A binding unit need not include full-length antibody heavy and light chains, but will typically be bivalent, i.e., will include two “antigen-binding domains,” as defined above. As used herein, certain binding molecules provided in this disclosure are “dimeric,” and include two bivalent binding units that include IgA constant regions or multimerizing fragments thereof. Certain binding molecules provided in this disclosure are “pentameric” or “hexameric,” and include five or six bivalent binding units that include IgM constant regions or multimerizing fragments or variants thereof. A binding molecule, e.g., an antibody or antibody-like molecule or antibody-derived binding molecule, comprising two or more, e.g., two, five, or six binding units, is referred to herein as “multimeric.”

[0072] The term “J-chain” as used herein refers to the J-chain of IgM or IgA antibodies of any animal species, any functional fragment thereof, derivative thereof, and/or variant thereof, including a mature human J-chain, the amino acid sequence of which is presented as SEQ ID NO: 7. Various J-chain variants and modified J-chain derivatives are disclosed herein. As persons of ordinary skill in the art will recognize, “a functional fragment” or “a functional variant” includes those fragments and variants that can associate with IgM heavy chain constant regions to form a pentameric IgM antibody or can associate with IgA heavy chain constant regions to form a dimeric IgA antibody.

[0073] The term “modified J-chain” is used herein to refer to a derivative of a J-chain polypeptide comprising a heterologous moiety, e.g., a heterologous polypeptide, e.g., an extraneous binding domain or functional domain introduced into or attached to the J-chain sequence. The introduction can be achieved by any means, including direct or indirect fusion of the heterologous polypeptide or other moiety or by attachment through a peptide or chemical linker. The term “modified human J-chain” encompasses, without limitation, the human J-chain comprising the amino acid sequence of SEQ ID NO: 7 or functional fragment thereof, or functional variant thereof, modified by the introduction of a heterologous moiety, e.g., a heterologous polypeptide, e.g., an extraneous binding domain. In certain embodiments the heterologous moiety does not interfere with efficient polymerization of IgM into a pentamer or IgA into a multimer, e.g., a dimer or tetramer, and binding of such polymers to a target. Exemplary modified J-chains can be found, e.g., in U.S. Pat. Nos. 9,951,134, 10,400,038, and 10,618,978, and in U.S. Patent Application Publication No. US-2019-0185570, each of which is incorporated herein by reference in its entirety.

[0074] As used herein the term “IgM-derived binding molecule” refers collectively to native IgM antibodies, IgM-like antibodies, as well as other IgM-derived binding molecules comprising non-antibody binding and/or functional domains instead of an antibody antigen binding domain or subunit thereof, and any fragments, e.g., multimerizing fragments, variants, or derivatives thereof.

[0075] As used herein, the term “IgM-like antibody” refers generally to a variant antibody or antibody-derived binding molecule that still retains the ability to form hexamers or pentamers, e.g., in association with a J-chain. An IgM-like antibody or other IgM-derived binding molecule typically includes at least the Cμ4-tp domains of the IgM constant region but can include heavy chain constant region domains from other antibody isotypes, e.g., IgG, from the same species or from a different species. An IgM-like antibody or other IgM-derived binding molecule can likewise be an antibody fragment in which one or more constant regions are deleted, as long as the IgM-like antibody is capable of forming hexamers and/or pentamers. Thus, an IgM-like antibody or other IgM-derived binding molecule can be, e.g., a hybrid IgM/IgG antibody or can be a “multimerizing fragment” of an IgM antibody.

[0076] As used herein the term “IgA-derived binding molecule” refers collectively to native IgA antibodies, IgA-like antibodies, as well as other IgA-derived binding molecules comprising non-antibody binding and/or functional domains instead of an antibody antigen binding domain or subunit thereof, and any fragments, e.g., multimerizing fragments, variants, or derivatives thereof.

[0077] As used herein, the term “IgA-like antibody” refers generally to a variant antibody or antibody-derived binding molecule that still retains the ability to form multimers, e.g., dimers, trimers, tetramers, and/or pentamers e.g., dimers and/or tetramers, e.g., in association with a J-chain. An IgA-like antibody or other IgA-derived binding molecule typically includes at least the Cα3-tp domains of the IgA constant region but can include heavy chain constant region domains from other antibody isotypes, e.g., IgG, from the same species or from a different species. An IgA-like antibody or other IgA-derived binding molecule can likewise be an antibody fragment in which one or more constant regions are deleted, as long as the IgA-like antibody can form multimers, e.g., dimers and/or tetramers. Thus, an IgA-like antibody or other IgA-derived binding molecule can be, e.g., a hybrid IgA/IgG antibody or can be a “multimerizing fragment” of an IgA antibody.

[0078] The terms “valency,” “bivalent,” “multivalent” and grammatical equivalents, refer to the number of binding domains, e.g., antigen-binding domains in given binding molecule, e.g., antibody, antibody-derived, or antibody-like molecule, or in a given binding unit. As such, the terms “bivalent”, “tetravalent”, and “hexavalent” in reference to a given binding molecule, e.g., an IgM antibody, IgM-like antibody, other IgM-derived binding molecule, or multimerizing fragment thereof, denote the presence of two antigen-binding domains, four antigen-binding domains, and six antigen-binding domains, respectively. A typical IgM antibody, IgM-like antibody, or other IgM-derived binding molecule, where each binding unit is bivalent, can have 10 or 12 valencies. A bivalent or multivalent binding molecule, e.g., antibody or antibody-derived molecule, can be monospecific, i.e., all of the antigen-binding domains are the same, or can be bispecific or multispecific, e.g., where two or more antigen-binding domains are different, e.g., bind to different epitopes on the same antigen, or bind to entirely different antigens.

[0079] The term “epitope” includes any molecular determinant capable of specific binding to an antigen-binding domain of an antibody, antibody-like, or antibody-derived molecule. In certain embodiments, an epitope can include chemically active surface groupings of molecules such as amino acids, sugar side chains, phosphoryl groups, or sulfonyl groups, and, in certain embodiments, can have three-dimensional structural characteristics, and or specific charge characteristics. An epitope is a region of a target that is bound by an antigen-binding domain of an antibody.

[0080] The term “target” is used in the broadest sense to include substances that can be bound by a binding molecule, e.g., antibody, antibody-like, or antibody-derived molecule. A target can be, e.g., a polypeptide, a nucleic acid, a carbohydrate, a lipid, or other molecule, or a minimal epitope on such molecule. Moreover, a “target” can, for example, be a cell, an organ, or an organism, e.g., an animal, plant, microbe, or virus, that comprises an epitope that can be bound by a binding molecule, e.g., antibody, antibody-like, or antibody-derived molecule.

[0081] Both the light and heavy chains of antibodies, antibody-like, or antibody-derived molecules are divided into regions of structural and functional homology. The terms “constant” and “variable” are used functionally. In this regard, it will be appreciated that the variable domains of both the variable light (VL) and variable heavy (VH) chain portions determine antigen recognition and specificity. Conversely, the constant region domains of the light chain (CL) and the heavy chain (e.g., CH1, CH2, CH3, or CH4) confer biological properties such as secretion, transplacental mobility, Fc receptor binding, complement binding, and the like. By convention, the numbering of the constant region domains increases as they become more distal from the antigen-binding site or amino-terminus of the antibody. The N-terminal portion is a variable region and at the C-terminal portion is a constant region; the CH3 (or CH4, e.g., in the case of IgM) and CL domains actually comprise the carboxy-terminus of the heavy and light chain, respectively.

[0082] A “full length IgM antibody heavy chain” is a polypeptide that includes, in N-terminal to C-terminal direction, an antibody heavy chain variable domain (VH), an antibody heavy chain constant domain 1 (CM1 or Cμ1), an antibody heavy chain constant domain 2 (CM2 or Cμ2), an antibody heavy chain constant domain 3 (CM3 or Cμ3), and an antibody heavy chain constant domain 4 (CM4 or Cμ4) that can include a tailpiece.

[0083] A “full length IgA antibody heavy chain” is a polypeptide that includes, in N-terminal to C-terminal direction, an antibody heavy chain variable domain (VH), an antibody heavy chain constant domain 1 (CA1 or Cα1), an IgA hinge region, an antibody heavy chain constant domain 2 (CA2 or Cα2), and an antibody heavy chain constant domain 3 (CA3 or Cα3) that can include an IgA tailpiece.

[0084] As indicated above, variable region(s) allow a binding molecule, e.g., antibody, antibody-like, or antibody-derived molecule, to selectively recognize and specifically bind epitopes on antigens. That is, the VL domain and VH domain, or subset of the complementarity determining regions (CDRs), of a binding molecule, e.g., an antibody, antibody-like, or antibody-derived molecule, combine to form the antigen-binding domain. More specifically, an antigen-binding domain can be defined by three CDRs on each of the VH and VL chains. Certain antibodies form larger structures. For example, IgA can form a molecule that includes two H2L2 binding units and a J-chain covalently connected via disulfide bonds, which can be further associated with a secretory component, and IgM can form a pentameric or hexameric molecule that includes five or six H2L2 binding units and optionally a J-chain covalently connected via disulfide bonds.

[0085] The six “complementarity determining regions” or “CDRs” present in an antibody antigen-binding domain are short, non-contiguous sequences of amino acids that are specifically positioned to form the antigen-binding domain as the antibody assumes its three-dimensional configuration in an aqueous environment. The remainder of the amino acids in the antigen-binding domain, referred to as “framework” regions, show less inter-molecular variability. The framework regions largely adopt a β-sheet conformation and the CDRs form loops which connect, and in some cases form part of, the β-sheet structure. Thus, framework regions act to form a scaffold that provides for positioning the CDRs in correct orientation by inter-chain, non-covalent interactions. The antigen-binding domain formed by the positioned CDRs defines a surface complementary to the epitope on the immunoreactive antigen. This complementary surface promotes the non-covalent binding of the antibody to its cognate epitope. The amino acids that make up the CDRs and the framework regions, respectively, can be readily identified for any given heavy or light chain variable region by one of ordinary skill in the art, since they have been defined in various different ways (see, “Sequences of Proteins of Immunological Interest,” Kabat, E., et al., U.S. Department of Health and Human Services, (1983); and Chothia and Lesk, J. Mol. Biol., 196:901-917 (1987), which are incorporated herein by reference in their entireties).

[0086] In the case where there are two or more definitions of a term which is used and/or accepted within the art, the definition of the term as used herein is intended to include all such meanings unless explicitly stated to the contrary. A specific example is the use of the term “complementarity determining region” (“CDR”) to describe the non-contiguous antigen combining sites found within the variable region of both heavy and light chain polypeptides. These particular regions have been described, for example, by Kabat et al., U.S. Dept. of Health and Human Services, “Sequences of Proteins of Immunological Interest” (1983) and by Chothia et al., J. Mol. Biol. 196:901-917 (1987), which are incorporated herein by reference. The Kabat and Chothia definitions include overlapping or subsets of amino acids when compared against each other. Nevertheless, application of either definition (or other definitions known to those of ordinary skill in the art) to refer to a CDR of an antibody or variant thereof is intended to be within the scope of the term as defined and used herein, unless otherwise indicated. The appropriate amino acids which encompass the CDRs as defined by each of the above cited references are set forth below in Table 1 as a comparison. The exact amino acid numbers which encompass a particular CDR will vary depending on the sequence and size of the CDR. Those skilled in the art can routinely determine which amino acids comprise a particular CDR given the variable region amino acid sequence of the antibody.

TABLE 1
CDR Definitions*

| | Kabat | Chothia |
|---|---|---|
| VH CDR1 | 31-35 | 26-32 |
| VH CDR2 | 50-65 | 52-58 |
| VH CDR3 | 95-102 | 95-102 |
| VL CDR1 | 24-34 | 26-32 |
| VL CDR2 | 50-56 | 50-52 |
| VL CDR3 | 89-97 | 91-96 |

*Numbering of all CDR definitions in Table 1 is according to the numbering conventions set forth by Kabat et al. (see below).

[0087] Antibody variable domains can also be analyzed, e.g., using the IMGT information system (imgt.cines.fr) (IMGT®/V-Quest) to identify variable region segments, including CDRs. (See, e.g., Brochet et al., Nucl. Acids Res. 36:W503-508, 2008). IMGT uses a different numbering system than Kabat. See, e.g., Lefranc, M.-P. et al., Dev. Comp. Immunol. 27:55-77 (2003). Correspondences are listed, for example, at imgt.org/IMGTScientificChart/Numbering/CDR1-IMGTgaps.html.

[0088] Kabat et al. also defined a numbering system for variable domain sequences that is applicable to any antibody. One of ordinary skill in the art can unambiguously assign this system of “Kabat numbering” to any variable domain sequence, without reliance on any experimental data beyond the sequence itself. As used herein, “Kabat numbering” refers to the numbering system set forth by Kabat et al., U.S. Dept. of Health and Human Services, “Sequence of Proteins of Immunological Interest” (1983). Unless use of the Kabat numbering system is explicitly noted, however, consecutive numbering is used for all amino acid sequences in this disclosure.

[0089] The Kabat numbering system for the human IgM constant domain can be found in Kabat, et. al. “Tabulation and Analysis of Amino acid and nucleic acid Sequences of Precursors, V-Regions, C-Regions, J-Chain, T-Cell Receptors for Antigen, T-Cell Surface Antigens, 0-2 Microglobulins, Major Histocompatibility Antigens, Thy-1, Complement, C-Reactive Protein, Thymopoietin, Integrins, Post-gamma Globulin, α-2 Macroglobulins, and Other Related Proteins,” U.S. Dept. of Health and Human Services (1991). IgM constant regions can be numbered sequentially (i.e., amino acid #1 starting with the first amino acid of the constant region, or by using the Kabat numbering scheme. A comparison of the numbering of two alleles of the human IgM constant region sequentially (presented herein as SEQ ID NO: 1 (allele IGHM*03) and SEQ ID NO: 2 (allele IGHM*04)) and by the Kabat system is set out below. The underlined amino acid residues are not accounted for in the Kabat system (“X,” double underlined below, can be serine (S) (SEQ ID NO: 1) or glycine (G) (SEQ ID NO: 2)): Sequential (SEQ ID NO: 1 or SEQ ID NO: 2)/KABAT numbering key for IgM heavy chain

```
    1/127 GSASAPTLFP LVSCENSPSD TSSVAVGCLA QDFLPDSITF SWKYKNNSDI
  51/176 SSTRGFPSVL RGGKYAATSQ VLLPSKDVMQ GTDEHVVCKV QHPNGNKEKN
101/226 VPLPVIAELP PKVSVFVPPR DGFFGNPRKS KLICQATGFS PRQIQVSWLR
151/274 EGKQVGSGVT TDQVQAEAKE SGPTTYKVTS TLTIKESDWL XQSMFTCRVD
201/324 HRGLTFQQNA SSMCVPDQDT AIRVFAIPPS FASIFLTKST KLTCLVTDLT
251/374 TYDSVTISWT RQNGEAVKTH TNISESHPNA TFSAVGEASI CEDDWNSGER
301/424 FTCTVTHTDL PSPLKQTISR PKGVALHRPD VYLLPPAREQ LNLRESATIT
351/474 CLVTGFSPAD VFVQWMQRGQ PLSPEKYVTS APMPEPQAPG RYFAHSILTV
401/524 SEEEWNTGET YTCVVAHEAL PNRVTERTVD KSTGKPTLYN VSLVMSDTAG
451/574 TCY
```

[0090] Binding molecules, e.g., antibodies, antibody-like, or antibody-derived molecules, antigen-binding fragments, variants, or derivatives thereof, and/or multimerizing fragments thereof include, but are not limited to, polyclonal, monoclonal, human, humanized, or chimeric antibodies, single chain antibodies, epitope-binding fragments, e.g., Fab, Fab′ and F(ab′)₂, Fd, Fvs, single-chain Fvs (scFv), single-chain antibodies, disulfide-linked Fvs (sdFv), fragments comprising either a VL or VH domain, fragments produced by a Fab expression library. ScFv molecules are known in the art and are described, e.g., in U.S. Pat. No. 5,892,019.

[0091] By “specifically binds,” it is generally meant that a binding molecule, e.g., an antibody or fragment, variant, or derivative thereof binds to an epitope via its antigen-binding domain, and that the binding entails some complementarity between the antigen-binding domain and the epitope. According to this definition, a binding molecule, e.g., antibody, antibody-like, or antibody-derived molecule, is said to “specifically bind” to an epitope when it binds to that epitope, via its antigen-binding domain more readily than it would bind to a random, unrelated epitope. The term “specificity” is used herein to qualify the relative affinity by which a certain binding molecule binds to a certain epitope. For example, binding molecule “A” can be deemed to have a higher specificity for a given epitope than binding molecule “B,” or binding molecule “A” can be said to bind to epitope “C” with a higher specificity than it has for related epitope “D.”

[0092] A binding molecule, e.g., an antibody or fragment, variant, or derivative thereof disclosed herein can be said to bind a target antigen with an off rate (k(off)) of less than or equal to 5×10⁻² sec⁻¹, 10⁻² sec⁻¹, 5×10⁻³ sec⁻¹, 10⁻³ sec⁻¹, 5×10⁻⁴ sec⁻¹, 10⁻⁴ sec⁻¹, 5×10⁻⁵ sec⁻¹, or 10⁻⁵ sec⁻¹ 5×10⁻⁶ sec⁻¹, 10⁻⁶ sec⁻¹, 5×10⁻⁷ sec⁻¹ or 10⁻⁷ sec⁻¹.

[0093] A binding molecule, e.g., an antibody or antigen-binding fragment, variant, or derivative disclosed herein can be said to bind a target antigen with an on rate (k(on)) of greater than or equal to 10³ M⁻¹ sec⁻¹, 5×10³ M⁻¹ sec⁻¹, 10⁴ M⁻¹ sec⁻¹, 5×10⁴ M⁻¹ sec⁻¹, 10⁵ M⁻¹ sec⁻¹, 5×10⁵ M⁻¹ sec⁻¹, 10⁶ M⁻¹ sec⁻¹, or 5×10⁶ M⁻¹ sec⁻¹ or 10⁷ M⁻¹ sec⁻¹.

[0094] A binding molecule, e.g., an antibody or fragment, variant, or derivative thereof is said to competitively inhibit binding of a reference antibody or antigen-binding fragment to a given epitope if it preferentially binds to that epitope to the extent that it blocks, to some degree, binding of the reference antibody or antigen-binding fragment to the epitope. Competitive inhibition can be determined by any method known in the art, for example, competition ELISA assays. A binding molecule can be said to competitively inhibit binding of the reference antibody or antigen-binding fragment to a given epitope by at least 90%, at least 80%, at least 70%, at least 60%, or at least 50%.

[0095] As used herein, the term “affinity” refers to a measure of the strength of the binding of an individual epitope with one or more antigen-binding domains, e.g., of an immunoglobulin molecule. See, e.g., Harlow et al., Antibodies: A Laboratory Manual, (Cold Spring Harbor Laboratory Press, 2nd ed. 1988) at pages 27-28. As used herein, the term “avidity” refers to the overall stability of the complex between a population of antigen-binding domains and an antigen. See, e.g., Harlow at pages 29-34. Avidity is related to both the affinity of individual antigen-binding domains in the population with specific epitopes, and also the valencies of the immunoglobulins and the antigen. For example, the interaction between a bivalent monoclonal antibody and an antigen with a highly repeating epitope structure, such as a polymer, would be one of high avidity. An interaction between a bivalent monoclonal antibody with a receptor present at a high density on a cell surface would also be of high avidity.

[0096] Binding molecules, e.g., antibodies or fragments, variants, or derivatives thereof as disclosed herein can also be described or specified in terms of their cross-reactivity. As used herein, the term “cross-reactivity” refers to the ability of a binding molecule, e.g., an antibody or fragment, variant, or derivative thereof, specific for one antigen, to react with a second antigen; a measure of relatedness between two different antigenic substances. Thus, a binding molecule is cross reactive if it binds to an epitope other than the one that induced its formation. The cross-reactive epitope generally contains many of the same complementary structural features as the inducing epitope, and in some cases, can actually fit better than the original.

[0097] A binding molecule, e.g., an antibody or fragment, variant, or derivative thereof can also be described or specified in terms of their binding affinity to an antigen. For example, a binding molecule can bind to an antigen with a dissociation constant or K_{D} no greater than 5×10⁻² M, 10⁻² M, 5×10⁻³M, 10⁻³M, 5×10⁻⁴ M, 10⁻⁴ M, 5×10⁻⁵ M, 10⁻⁵ M, 5×10⁻⁶ M, 10⁻⁶ M, 5×10⁻⁷ M, 10⁻⁷ M, 5×10⁻⁸M, 10⁻⁸M, 5×10⁻⁹M, 10⁻⁹M, 5×10⁻¹⁰M, 10⁻¹⁰M, 5×10⁻¹¹M, 10⁻¹¹M, 5×10⁻¹² M, 10⁻¹² M, 5×10⁻¹³M, 10⁻¹³M, 5×10⁻¹⁴ M, 10⁻¹⁴ M, 5×10⁻¹⁵ M, or 10⁻¹⁵ M.

[0098] “Antigen-binding antibody fragments” including single-chain antibodies or other antigen-binding domains can exist alone or in combination with one or more of the following: hinge region, CH1, CH2, CH3, or CH4 domains, J-chain, or secretory component. Also included are antigen-binding fragments that can include any combination of variable region(s) with one or more of a hinge region, CH1, CH2, CH3, or CH4 domains, a J-chain, or a secretory component. Binding molecules, e.g., antibodies, or antigen-binding fragments thereof can be from any animal origin including birds and mammals. The antibodies can be human, murine, donkey, rabbit, goat, guinea pig, camel, llama, horse, or chicken antibodies. In another embodiment, the variable region can be condricthoid in origin (e.g., from sharks). As used herein, “human” antibodies include antibodies having the amino acid sequence of a human immunoglobulin and include antibodies isolated from human immunoglobulin libraries or from animals transgenic for one or more human immunoglobulins and can in some instances express endogenous immunoglobulins and some not, as described infra and, for example in, U.S. Pat. No. 5,939,598 by Kucherlapati et al. According to embodiments of the present disclosure, an IgM antibody, IgM-like antibody, or other IgM-derived binding molecule as provided herein can include an antigen-binding fragment of an antibody, e.g., a scFv fragment, so long as the IgM antibody, IgM-like antibody, or other IgM-derived binding molecule is able to form a multimer, e.g., a hexamer or a pentamer, and an IgA antibody, IgA-like antibody, or other IgA-derived binding molecule as provided herein can include an antigen-binding fragment of an antibody, e.g., a scFv fragment, so long as the IgA antibody, IgA-like antibody, or other IgA-derived binding molecule is able to form a multimer, e.g., a dimer and/or a tetramer. As used herein such a fragment comprises a “multimerizing fragment.”

[0099] As used herein, the term “heavy chain subunit” includes amino acid sequences derived from an immunoglobulin heavy chain, a binding molecule, e.g., an antibody, antibody-like, or antibody-derived molecule comprising a heavy chain subunit can include at least one of: a VH domain, a CH1 domain, a hinge (e.g., upper, middle, and/or lower hinge region) domain, a CH2 domain, a CH3 domain, a CH4 domain, or a variant or fragment thereof. For example, a binding molecule, e.g., an antibody, antibody-like, or antibody-derived molecule, or fragment, e.g., multimerizing fragment, variant, or derivative thereof can include without limitation, in addition to a VH domain: a CH1 domain; a CH1 domain, a hinge, and a CH2 domain; a CH1 domain and a CH3 domain; a CH1 domain, a hinge, and a CH3 domain; or a CH1 domain, a hinge domain, a CH2 domain, and a CH3 domain. In certain embodiments a binding molecule, e.g., an antibody, antibody-like, or antibody-derived molecule, or fragment, e.g., multimerizing fragment, variant, or derivative thereof can include, in addition to a VH domain, a CH3 domain and a CH4 domain; or a CH3 domain, a CH4 domain, and a J-chain. Further, a binding molecule, e.g., an antibody, antibody-like, or antibody-derived molecule, for use in the disclosure can lack certain constant region portions, e.g., all or part of a CH2 domain. It will be understood by one of ordinary skill in the art that these domains (e.g., the heavy chain subunit) can be modified such that they vary in amino acid sequence from the original immunoglobulin molecule. According to embodiments of the present disclosure, an IgM antibody, IgM-like antibody, or other IgM-derived binding molecule as provided herein comprises sufficient portions of an IgM heavy chain constant region to allow the IgM antibody, IgM-like antibody, or other IgM-derived binding molecule to form a multimer, e.g., a hexamer or a pentamer. As used herein such a fragment comprises a “multimerizing fragment.” According to embodiments of the present disclosure, an IgA antibody, IgA-like antibody, or other IgA-derived binding molecule as provided herein comprises sufficient portions of an IgA heavy chain constant region to allow the IgA antibody, IgA-like antibody, or other IgA-derived binding molecule to form a multimer, e.g., a dimer or a tetramer. As used herein such a fragment comprises a “multimerizing fragment.”

[0100] As used herein, the term “light chain subunit” includes amino acid sequences derived from an immunoglobulin light chain. The light chain subunit includes at least a VL, and can further include a CL (e.g., Cκ or Cλ) domain.

[0101] Binding molecules, e.g., antibodies, antibody-like molecules, antibody-derived molecules, antigen-binding fragments, variants, or derivatives thereof, or multimerizing fragments thereof can be described or specified in terms of the epitope(s) or portion(s) of a target, e.g., a target antigen that they recognize or specifically bind. The portion of a target antigen that specifically interacts with the antigen-binding domain of an antibody is an “epitope,” or an “antigenic determinant.” A target antigen can comprise a single epitope or at least two epitopes, and can include any number of epitopes, depending on the size, conformation, and type of antigen.

[0102] As used herein, the term “hinge region” includes the portion of a heavy chain molecule that joins the CH1 domain to the CH2 domain in IgG, IgA, and IgD heavy chains, and provides flexibility to the molecule.

[0103] As used herein the term “disulfide bond” includes the covalent bond formed between two sulfur atoms, e.g., in cysteine residues of a polypeptide. The amino acid cysteine comprises a thiol group that can form a disulfide bond or bridge with a second thiol group. Disulfide bonds can be “intra-chain,” i.e., linking to cysteine residues in a single polypeptide or polypeptide subunit, or can be “inter-chain,” i.e., linking two separate polypeptide subunits, e.g., an antibody heavy chain and an antibody light chain, to antibody heavy chains, or an IgM or IgA antibody heavy chain constant region and a J-chain.

[0104] As used herein, the term “reference antibody” refers to an antibody with function similar to a multimeric binding molecule provided by this disclosure, e.g., an antibody functionally interacting with the target protein of interest that can include similar or identical antigen-binding domains. Reference antibodies may be monoclonal or polyclonal antibodies. In a particular embodiment, a “reference antibody” is a single-binding unit antibody with identical binding domains to a corresponding multimeric binding molecule as provided herein, e.g., a multimeric antibody with two, four, five, or six binding units.

[0105] As used herein, the term “chimeric antibody” refers to an antibody in which the immunoreactive region or site is obtained or derived from a first species and the constant region (which can be intact, partial, or modified) is obtained from a second species. In some embodiments the target binding region or site will be from a non-human source (e.g., mouse or primate) and the constant region is human.

[0106] The terms “multispecific antibody” or “bispecific antibody” refer to an antibody, antibody-like, or antibody-derived molecule that has antigen-binding domains for two or more different epitopes within a single antibody molecule. Other binding molecules in addition to the canonical antibody structure can be constructed with two binding specificities. Epitope binding by bispecific or multispecific antibodies can be simultaneous or sequential. Triomas and hybrid hybridomas are two examples of cell lines that can secrete bispecific antibodies. Bispecific antibodies can also be constructed by recombinant means. (Strohlein and Heiss, Future Oncol. 6:1387-94 (2010); Mabry and Snavely, IDrugs. 13:543-9 (2010)). A bispecific antibody can also be a diabody.

[0107] As used herein, the term “engineered antibody” refers to an antibody in which a variable domain, constant region, and/or J-chain is altered by at least partial replacement of one or more amino acids. In certain embodiments entire CDRs from an antibody of known specificity can be grafted into the framework regions of a heterologous antibody. Although alternate CDRs can be derived from an antibody of the same class or even subclass as the antibody from which the framework regions are derived, CDRs can also be derived from an antibody of different class, e.g., from an antibody from a different species. An engineered antibody in which one or more “donor” CDRs from a non-human antibody of known specificity are grafted into a human heavy or light chain framework region is referred to herein as a “humanized antibody.” In certain embodiments not all of the CDRs are replaced with the complete CDRs from the donor variable region and yet the antigen-binding capacity of the donor can still be transferred to the recipient variable domains. Given the explanations set forth in, e.g., U.S. Pat. Nos. 5,585,089, 5,693,761, 5,693,762, and 6,180,370, it will be well within the competence of those skilled in the art, either by carrying out routine experimentation or by trial-and-error testing, to obtain a functional engineered or humanized antibody.

[0108] As used herein the term “engineered” includes manipulation of nucleic acid or polypeptide molecules by synthetic means (e.g., by recombinant techniques, in vitro peptide synthesis, by enzymatic or chemical coupling of peptides, nucleic acids, or glycans, or some combination of these techniques).

[0109] As used herein, the terms “linked,” “fused” or “fusion” or other grammatical equivalents can be used interchangeably. These terms refer to the joining together of two more elements or components, by whatever means including chemical conjugation or recombinant means. An “in-frame fusion” refers to the joining of two or more polynucleotide open reading frames (ORFs) to form a continuous longer ORF, in a manner that maintains the translational reading frame of the original ORFs. Thus, a recombinant fusion protein is a single protein containing two or more segments that correspond to polypeptides encoded by the original ORFs (which segments are not normally so joined in nature.) Although the reading frame is thus made continuous throughout the fused segments, the segments can be physically or spatially separated by, for example, in-frame linker sequence. For example, polynucleotides encoding the CDRs of an immunoglobulin variable region can be fused, in-frame, but be separated by a polynucleotide encoding at least one immunoglobulin framework region or additional CDR regions, as long as the “fused” CDRs are co-translated as part of a continuous polypeptide.

[0110] In the context of polypeptides, a “linear sequence” or a “sequence” is an order of amino acids in a polypeptide in an amino to carboxyl terminal direction in which amino acids that neighbor each other in the sequence are contiguous in the primary structure of the polypeptide. A portion of a polypeptide that is “amino-terminal” or “N-terminal” to another portion of a polypeptide is that portion that comes earlier in the sequential polypeptide chain. Similarly, a portion of a polypeptide that is “carboxy-terminal” or “C-terminal” to another portion of a polypeptide is that portion that comes later in the sequential polypeptide chain. For example, in a typical antibody, the variable domain is “N-terminal” to the constant region, and the constant region is “C-terminal” to the variable domain.

[0111] The term “expression” as used herein refers to a process by which a gene produces a biochemical, for example, a polypeptide. The process includes any manifestation of the functional presence of the gene within the cell including, without limitation, gene knockdown as well as both transient expression and stable expression. It includes without limitation transcription of the gene into RNA, e.g., messenger RNA (mRNA), and the translation of such mRNA into polypeptide(s). If the final desired product is a biochemical, expression includes the creation of that biochemical and any precursors. Expression of a gene produces a “gene product.” As used herein, a gene product can be either a nucleic acid, e.g., a messenger RNA produced by transcription of a gene, or a polypeptide that is translated from a transcript. Gene products described herein further include nucleic acids with post transcriptional modifications, e.g., polyadenylation, or polypeptides with post translational modifications, e.g., methylation, glycosylation, the addition of lipids, association with other protein subunits, proteolytic cleavage, and the like.

[0112] The terms “neutralizing” or “neutralize” as used herein refer to the ability of a therapeutic, e.g., a therapeutic antibody, to reduce and/or prevent viral infectivity. The term “infectivity” as used herein refers to the ability of the virus to do one or more of attach to cells, enter cells, release its nucleic acid, replicate its nucleic acid, and synthesize viral proteins, and package its nucleic acid into new virions that can be released from the infected cell. A virus can be neutralized, e.g., by a therapeutic antibody, via the antibody's ability to specifically bind to the virion and inhibit its ability to attach to a host cell receptor, thereby preventing entry into the host cell.

[0113] The terms “potent” or “potency” as used herein refer to the amount required to produce an effect, e.g., the amount of a binding molecule required to neutralize infectivity of a human coronavirus. In some embodiments, the potency is measured as the 50% effective concentration (EC₅₀) or 50% inhibitory concentration (IC₅₀) to neutralize or otherwise block infectivity (e.g., block attachment of the virus to the cellular receptor) of the human coronavirus, or therapeutic protection of a subject infected with a human coronavirus, measured, e.g., as a 50% effective dose (ED₅₀), or prophylactic protection of a subject susceptible to human infection, measured, e.g., as a 50% effective dose (ED₅₀). As used herein in the context of virus neutralization, the terms “50% effective concentration (EC₅₀)” and “50% inhibitory concentration (IC₅₀)” can be used interchangeably.

[0114] As used herein, a “human coronavirus” or “H-CoV” is a virus of the family Coronaviridae that is capable of infecting humans. Some coronaviruses can be traced to zoonotic sources, e.g., bats. Certain betacoronaviruses can cause severe respiratory syndromes in humans and include, without limitation, SARS-CoV, MERS-CoV, and SARS-CoV-2. See, e.g., Sadia, A., and Basra, M. A. R., Drug Dev. Res. DOI: 10.1002/ddr.21710 (2020). The terms “SARS-CoV” and “SARS-CoV-1” are used interchangeably herein. Included herein are existing strains of human corona viruses, including but not limited to H-CoV strains 229E, NL63, OCH3, and HKV1. Further included are emerging variant strains of known human coronaviruses and escape variants including the 20H, 20I, 21A (Delta) Delta Plus, 21B (Kappa), 21D (Eta), and B.1.1.318 variants. Of particular relevance are emerging variants that are resistant to established therapeutics.

[0115] The phrase “structural protein” of a virus as used herein refer to a protein that is a component of a mature assembled viral particle and includes naturally-occurring variants. The four main structural proteins of the SARS-CoV and SARS-CoV-2 viruses include spike (S), envelope (E), membrane (M), and nucleic capsid (N). See, e.g., Sadia and Basra M. A. R., Drug Dev. Res. DOI: 10.1002/ddr.21710 (2020).

[0116] The phrases “emerging variant”, “escape mutant” or “escape variant” as used herein refer to strains of a human coronavirus comprising one or more mutations, such as a substitution, addition, or deletion, that reduces or prevents neutralization by a treatment or prophylactic, such as an antibody treatment or prophylaxis. An exemplary escape variant is a variant of an initial strain of SARS-CoV-2 that arises following contact of the initial strain of SARS-CoV-2, or cells infected with the initial strain of SARS-CoV-2, with an antibody capable of neutralizing the initial strain of SARS-CoV-2, where the escape variant is more resistant to neutralization by the antibody or is no longer capable of being neutralized by the antibody. SARS-CoV-2 escape variants can include one or more mutations, such as an amino acid substitutions, additions, or deletions, typically in the spike (S) protein, and typically in the receptor binding domain (RBD) of the S protein. Known SARS-CoV-2 escape variants that may be treated by compositions and methods described herein include, but are not limited to, 20I/501Y.V1 VOC 202012/01 (also referred to as B.1.1.7), 20H/501Y.V2 (also referred to as B.1.351), Delta variant (also referred to as B.1.617.2), Delta Plus, 20H, 20I, 21A (Delta) Delta Plus, 21B (Kappa), 21D (Eta), and B.1.1.318 variants and P.1 variants.

[0117] MERS escape variants or escape mutants can include one or more mutations, such as an amino acid substitutions, additions, or deletions, typically in the spike (S) protein, and typically in the receptor binding domain (RBD) of the S protein. Such mutants may be resistant to treatment, including immunotherapies. For example, mutations in the MERS-CoV spike (S) protein can result in reduced binding to DPP4. D510G and I528T mutations reduce S protein binding to DPP4, which can reduce levels of viral entry into cells having low levels of DPP4 (Kleine-Weber et al., J. Virol. 2019).

[0118] Terms such as “treating” or “treatment” or “to treat” or “alleviating” or “to alleviate” refer to therapeutic measures that cure, slow down, lessen symptoms of, lessen the severity of symptoms of, and/or halt or slow the progression of an existing diagnosed pathologic condition or disorder. Terms such as “prevent,” “prevention,” “avoid,” “deterrence,” “prophylactic,” and the like refer to prophylactic or preventative measures that can prevent the development of, or can reduce the symptoms of, a targeted pathologic condition or disorder in a subject who has not yet contracted the targeted pathologic condition or disorder. The targeted pathologic condition or disorder can be, for example, COVID-19. Thus, “those in need of treatment” can include those already infected with the human coronavirus, as well as those who wish to prevent infection, or reduce or alleviate symptoms associated with an infection should they become infected.

[0119] The terms “protect,” “protection,” “protective,” and other related terms, as used herein, refer to the ability of a therapeutic or prophylactic agent to confer a desirable effect on a subject diagnosed with or susceptible to an infectious disease resulting from a human coronavirus infection, such as COVID-19. Protection can include, for example, alleviation of or a reduction in infection-related symptoms in a subject infected with a human coronavirus, such as SARS-CoV-2, such that, for example, the subject does not need to be hospitalized or put on a ventilator. Protection can also include, for example, preventing healthcare workers, family members, or other contacts of infected patients from becoming infected with the human coronavirus, e.g., SARS-CoV-2, or if they do become infected, reducing the symptoms related to infection. As it applies to a therapeutic or prophylactic animal model, “protection” can include a lower 50% effective dose (ED₅₀) among a group of animal subjects challenged with the therapeutic agent either before or after challenge with the human coronavirus. Data points that can be used to measure ED₅₀ vary, e.g., with the animal model or the amount of human coronavirus used to challenge the animal subjects. Data points can include, e.g., measurement of the virus titer in the lungs of the animals, weight loss, death, or disease symptoms such as fever or difficulty breathing.

[0120] The terms “antibody-dependent enhancement” and “ADE” refer to the situation where the binding of an antibody or related binding molecule can increase infectivity of an infectious virus, including coronaviruses. See, e.g., Wen, J., et al., Int. J. Infect. Dis. 100:483-489 (2020).

[0121] As used herein the terms “serum half-life” or “plasma half-life” refer to the time it takes (e.g., in minutes, hours, or days) following administration for the serum or plasma concentration of a drug, e.g., a binding molecule such as an antibody, antibody-like, or antibody-derived molecule or fragment, e.g., multimerizing fragment thereof as described herein, to be reduced by 50%. Two half-lives can be described: the alpha half-life, a half-life, or t_{1/2}α, which is the rate of decline in plasma concentrations due to the process of drug redistribution from the central compartment, e.g., the blood in the case of intravenous delivery, to a peripheral compartment (e.g., a tissue or organ), and the beta half-life, β half-life, or t_{1/2}β which is the rate of decline due to the processes of excretion or metabolism.

[0122] As used herein the term “area under the plasma drug concentration-time curve” or “AUC” reflects the actual body exposure to drug after administration of a dose of the drug and is expressed in mg*h/L. This area under the curve can be measured, e.g., from time 0 (t₀) to infinity (∞) and is dependent on the rate of elimination of the drug from the body and the dose administered.

[0123] As used herein, the term “mean residence time” or “MRT” refers to the average length of time the drug remains in the body.

[0124] By “subject” or “individual” or “animal” or “patient” is meant any subject. In certain embodiments the subject is a mammalian subject, for whom diagnosis, prognosis, or therapy is desired. Mammalian subjects include humans, domestic animals, farm animals, and zoo, sports, or pet animals such as dogs, cats, guinea pigs, rabbits, rats, mice, horses, swine, cows, bears, and so on.

[0125] As used herein, as the term “a subject that would benefit from therapy” refers to a subset of subjects, from amongst all prospective subjects, which would benefit from administration of a given therapeutic agent, e.g., a binding molecule such as an antibody, comprising one or more antigen-binding domains. Such binding molecules, e.g., antibodies, can be used, e.g., for a diagnostic procedure and/or for treatment or prevention of a disease.

### Human Coronavirus, e.g., SARS-CoV-1, SARS-CoV-2, and MERS-CoV Binding Molecules

[0126] Provided herein are multimeric binding molecules comprising two to six bivalent binding units or variants or fragments thereof, where each binding unit comprises two IgA or IgM heavy chain constant regions or multimerizing fragments or variants thereof, each associated with a binding domain, where three to twelve of the binding domains are identical and specifically bind to a human coronavirus-, e.g., HCoV-229, HCoV-OC43, HCov-NL63, HCoV-HKU1, SARS-CoV, MERS-CoV, or SARS-CoV-2, any derivative or variant thereof, e.g., any naturally-occurring or non-naturally-occurring mutant (e.g., an escape mutant or emerging variant), or any combination thereof. The provided binding molecules can be used to treat or prevent human severe respiratory diseases caused by human coronaviruses, e.g., Coronavirus Disease 2019 (COVID-19).

[0127] In some embodiments, the binding molecules comprise three to twelve identical binding domains of the multimeric binding molecule that specifically bind to a human coronavirus comprise one or more heavy chain variable region (VH) and/or light chain variable region (VL) sequences or fragments thereof derived from antibodies with capacity to neutralize one or more human coronaviruses that are published in the Coronavirus Antibody Database (CoV-AbDAB), opig.stats.ox.ac.uk/webapps/covabdab/.

[0128] In some embodiments, the bivalent reference IgG antibody can bind SARS-CoV. In some embodiments, the bivalent reference IgG antibody can bind SARS-CoV-2. In some embodiments the bivalent reference antibody can bind MERS-CoV. In some embodiments, the bivalent reference molecule can bind more than one type of human coronavirus. In some embodiments, the bivalent reference IgG antibody can bind both SARS-CoV-2 and SARS-CoV. In some embodiments the bivalent reference antibody can bind SARS-CoV2, SARS-COV-1, and MERS-CoV. The ability of an antibody to bind a human coronavirus can readily be determined by one of skill in the art, such as by measuring binding in vitro using a technique such as enzyme-linked immunosorbent assay (ELISA). In some embodiments, the binding is determined at a specific concentration or within a range of concentrations of reference IgG antibody, e.g., at 0.1 nM, 1 nM, or 0.1 nM to 10 nM.

[0129] In some embodiments, the bivalent reference IgG antibody can neutralize a human coronavirus. In some embodiments, the bivalent reference IgG antibody can neutralize SARS-CoV-2. In some embodiments, the bivalent reference IgG antibody can neutralize SARS-CoV. In some embodiments the bivalent reference antibody can neutralize MERS-CoV. In some embodiments, the bivalent reference molecule can neutralize more than one type of human coronavirus. In some embodiments, the bivalent reference IgG antibody can neutralize SARS-CoV and SARS-CoV-2. In some embodiments, the bivalent reference IgG antibody can neutralize SARS-CoV-2 and cannot neutralize SARS-CoV. In some embodiments, the bivalent reference IgG antibody can neutralize SARS-CoV and cannot neutralize SARS-CoV-2. In some embodiments the bivalent reference antibody can neutralize SARS-CoV2, SARS-CoV, and MERS-CoV. In some embodiments the bivalent reference antibody can neutralize SARS-CoV2 and MERS-CoV.

[0130] In some embodiments, the provided binding molecule comprises two to six bivalent binding units or variants or multimerizing fragments thereof has greater avidity than the corresponding IgG reference antibody.

[0131] The ability of an antibody to neutralize a human coronavirus can readily be determined by one of skill in the art, such as by measuring infectivity in vitro using a viral or pseudoviral infectivity assay, such as an assay adapted from Richman et al. (PNAS, 2003, 100(7): 4144-4149) or described in Yuan et al., Science 10.1126/science.abb7269; (2020) or Muruato et al. (2020, Nat Comm. 11(1):4059. doi: 10.1038/s41467-020-17892-0). In some embodiments, the neutralization is determined at a specific concentration or within a range of concentrations of reference IgG antibody, e.g., at 0.1 nm, 1 nM, or 0.1 nM to 10 nM.

[0132] In certain embodiments, the greater potency of the provided multimeric binding molecule relative to the reference IgG can be measured, e.g., as inhibition of binding of the human coronavirus to its receptor, e.g., the SARS-CoV or SARS-CoV-2 spike protein binding to angiotensin-converting enzyme 2 (ACE2), at a lower 50% effective concentration (EC₅₀) or lower 50% inhibitory concentration (IC₅₀) than that of the bivalent reference IgG antibody. In certain embodiments the provided multimeric binding molecule can inhibit binding of the human coronavirus to its receptor, e.g., SARS-CoV or SARS-CoV-2 spike protein binding to ACE2 under conditions where the bivalent reference IgG antibody cannot inhibit binding. In certain embodiments, the greater potency of the provided multimeric binding molecule relative to the reference IgG can be measured, e.g., as inhibition of binding to the MERS-CoV spike protein binding of dipeptidyl-peptidase 4 (DPP4), at a lower EC₅₀ than the bivalent reference IgG antibody. In certain embodiments the provided multimeric binding molecule can inhibit binding of MERS-CoV-spike protein binding to DPP4 under conditions where the bivalent reference IgG antibody cannot inhibit binding. In certain embodiments, the provided multimeric binding molecule can neutralize the human coronavirus, e.g., SARS-CoV, SARS-CoV-2, or MERS-CoV, at a lower EC₅₀ than the bivalent reference IgG antibody. In certain embodiments, the provided multimeric binding molecule can neutralize the human coronavirus, e.g., SARS-CoV, SARS-CoV-2, or MERS-CoV under conditions where the bivalent reference IgG antibody cannot neutralize the respective human coronavirus. In certain embodiments, the provided multimeric binding molecule can protect infected animals, or prevent infection in uninfected animals in a therapeutic animal model at a lower 50% effective dose (ED₅₀) than the bivalent reference IgG antibody. In certain embodiments, the provided multimeric binding molecule can protect infected animals, or prevent infection in uninfected animals in a therapeutic animal model under conditions where the bivalent reference IgG antibody cannot protect. In certain embodiments, the provided multimeric binding molecule can comprise any combination of the foregoing properties.

[0133] In certain embodiments, the provided multimeric binding molecule can neutralize infectivity of a human coronavirus, e.g., SARS-CoV, SARS-CoV-2, or MERS-CoV, at a lower EC₅₀ than the bivalent reference IgG antibody. In certain embodiments, the provided multimeric binding molecule can neutralize infectivity of a human coronavirus, e.g., SARS-CoV, SARS-CoV-2, or MERS-CoV under conditions where the bivalent reference IgG antibody cannot neutralize. In certain embodiments, the EC₅₀ of the provided multimeric binding molecule is at least two-fold, at least five-fold, at least ten-fold, at least fifty-fold, at least 100-fold, at least 500-fold, or at least 1000-fold, or at least 10,000-fold lower than the EC₅₀ of the bivalent reference IgG antibody. The EC₅₀ can be measured either as mass per volume, e.g., μg/ml, or as the number of molecules present, e.g., moles/liter. In certain embodiments, the conditions where the bivalent reference IgG antibody cannot neutralize comprise neutralization of an antibody-resistant variant of a human coronavirus, e.g., SARS-CoV, SARS-CoV-2, or MERS-CoV. In certain embodiments, the antibody resistant variant of the human coronavirus, e.g., SARS-CoV, SARS-CoV-2, or MERS-CoV, comprises an “escape mutant” of a human coronavirus, e.g., SARS-CoV, SARS-CoV-2, or MERS-CoV virus that arose following contact with the bivalent reference IgG antibody. By “the human coronavirus, e.g., a SARS-CoV, SARS-CoV-2, or MERS-CoV virus that arose following contact with the bivalent reference IgG antibody” is meant a variant SARS-CoV-2 or MERS-CoV virus that arises in response to selective pressure. For example, an escape mutant can arise during an in vitro neutralization assay in which SARS-CoV-2 virus is contacted with the bivalent reference IgG antibody and then used to infect ACE2-expressing host cells, or during in in vivo infection of a subject animal, where the subject animal is administered the bivalent reference IgG antibody either prior to or subsequent to the virus infection. During viral replication in the host cells or subject animal mutations may arise that confer resistance to the bivalent reference IgG antibody.

[0134] In some embodiments the provided multimeric binding molecule can confer protection against a human coronavirus, e.g., SARS-CoV, SARS-CoV-2, or MERS-CoV, infection in a therapeutic or prophylactic animal model at a lower 50% effective dose (ED₅₀) than the bivalent reference IgG antibody, or wherein the binding molecule can confer protection against the human coronavirus, e.g., SARS-CoV, SARS-CoV-2, or MERS-CoV, infection in a therapeutic or prophylactic animal model under conditions where the bivalent reference IgG antibody cannot protect. As used herein, measurements of “protection” against the human coronavirus, e.g., SARS-CoV, SARS-CoV-2, or MERS-CoV, infection in an animal model can include a reduced human coronavirus, e.g., SARS-CoV, SARS-CoV-2, or MERS-CoV viral load in the subject animals, e.g., in the animals' lungs, survival of the subject animals from an otherwise lethal human coronavirus infection, and/or a reduction of symptoms typical of the human coronavirus infection in the animal model, e.g., weight loss, fever, difficulty breathing, or neurological symptoms. The ED₅₀ can be measured either as mass per volume, e.g., μg/ml, or as the number of molecules present, e.g., moles/liter. In certain embodiments, the conditions where the bivalent reference IgG antibody cannot protect comprises a virus challenge with an antibody-resistant variant of a human coronavirus, e.g., SARS-CoV, SARS-CoV-2, or MERS-CoV. In certain embodiments, the antibody resistant variant of the human coronavirus comprises an “escape mutant” of a human coronavirus that arose following contact with a bivalent reference IgG antibody.

[0135] In some embodiments the multimeric binding molecule reduces, inhibits, or blocks the human coronavirus from binding to its receptor at a lower EC₅₀ than the bivalent reference IgG antibody or reduces, inhibits, or blocks the human coronavirus from binding to its receptor under conditions where the bivalent reference IgG antibody cannot reduce, inhibit, or block the human coronavirus from binding to its receptor. In certain embodiments, the receptor is expressed on the surface of a cell, e.g., a cultured host cell, e.g., a Vero cell, or a cell in a susceptible subject, e.g., a human subject. In some embodiments, the binding molecule inhibits human coronavirus binding to its receptor at a lower 50% effective concentration (EC₅₀) than the bivalent reference IgG antibody. In some embodiments, the EC₅₀ is at least two-fold, at least three-fold, at least four-fold, at least five-fold, at least ten-fold, at least twenty-fold, at least thirty-fold, at least forty-fold, or at least fifty-fold lower than the EC₅₀ of the bivalent reference IgG antibody.

[0136] In some embodiments, the multimeric binding molecule binds a cell surface receptor involved in the attachment of the human coronavirus to a cell, a prerequisite for viral infection of the cell. In some embodiments, the human coronavirus is SARS-CoV (also referred to herein as SARS-CoV1), SARS-CoV-2, or human coronavirus NL63/HCoV-NL63, and the multimeric binding molecule reduces, inhibits, or blocks the human coronavirus from binding to its receptor, ACE2. An exemplary precursor human ACE2 amino acid sequence (UniprotKB Q9BYF1) is presented as SEQ ID NO: 14. As provided by UniprotKB, the signal peptide comprises amino acids 1 to 17 of SEQ ID NO: 14, the mature protein comprises amino acids 18 to 805 of SEQ ID NO: 2, the extracellular domain comprises amino acids 18 to 740 of SEQ ID NO: 14, the transmembrane domain comprises amino acids 741 to 761 of SEQ ID NO: 14, and the cytoplasmic domain comprises amino acids 762 to 805 of SEQ ID NO: 14. Amino acids 30-41, 82-84, and 353-357 of SEQ ID NO: 14 are reported to interact with the SARS-CoV spike protein. See Zhang, C., et al., EMBO J. 24:1634-1643 (2005).

[0137] In some embodiments, the human coronavirus is HCoV-229, and the multimeric binding molecule reduces, inhibits, or blocks the human coronavirus from binding to its receptor, aminopeptidase N (hAPN), also known as CD13.

[0138] In some embodiments, the human coronavirus is HCoV-OC43, and the multimeric binding molecule reduces, inhibits, or blocks the human coronavirus from binding to its receptor, n-acetyl-9-O-acetylneuraminic acid.

[0139] In some embodiments, the human coronavirus is HCoV-HKU1, and the multimeric binding molecule reduces, inhibits, or blocks the human coronavirus from binding to its receptor, O-acetylated sialic acid.

[0140] In some embodiments, the human coronavirus is MERS-CoV, and the multimeric binding molecule reduces, inhibits, or blocks the human coronavirus from binding to its receptor, dipeptidyl-peptidase 4 (DPP4), also known as CD26. An exemplary version of human DPP4 has the UniProtKB accession number P27487.

[0141] In some embodiments the multimeric binding molecule reduces, inhibits, or blocks the SARS-CoV or the SARS-CoV-2 S protein from binding to ACE2 at a lower EC₅₀ than the bivalent reference IgG antibody or reduces, inhibits, or blocks the SARS-CoV or the SARS-CoV-2 S protein from binding to ACE2 under conditions where the bivalent reference IgG antibody cannot reduce, inhibit, or block the SARS-CoV or the SARS-CoV-2 S protein from binding to ACE2. In certain embodiments the ACE2 is human ACE2, e.g., amino acids 18 to 805 of SEQ ID NO: 14. In certain embodiments, ACE2 is expressed on the surface of a cell, e.g., a cultured host cell, e.g., a Vero cell, or a cell in a susceptible subject, e.g., a human subject. In some embodiments, the binding molecule inhibits SARS-CoV-2 binding to its receptor, e.g., ACE2, at a lower 50% effective concentration (EC₅₀) than the bivalent reference IgG antibody. In some embodiments, the EC₅₀ is at least two-fold, at least three-fold, at least four-fold, at least five-fold, at least ten-fold, at least twenty-fold, at least thirty-fold, at least forty-fold, or at least fifty-fold lower than the EC₅₀ of the bivalent reference IgG antibody.

[0142] In some embodiments the multimeric binding molecule reduces, inhibits, or blocks the MERS-CoV S protein from binding to DPP4/CD26 at a lower EC₅₀ than the bivalent reference IgG antibody or reduces, inhibits, or blocks the MERS-CoV S protein from binding to DPP4/CD26 under conditions where the bivalent reference IgG antibody cannot reduce, inhibit, or block the MERS-CoV S protein from binding to DPP4/CD26. In certain embodiments the DPP4/CD26 is human DPP4/CD26. In certain embodiments, DPP4/CD26 is expressed on the surface of a cell, e.g., a cultured host cell, e.g., a Vero cell, or a cell in a susceptible subject, e.g., a human subject. In some embodiments, the binding molecule inhibits MERS-CoV binding to its receptor, e.g., DPP4/CD26, at a lower 50% effective concentration (EC₅₀) than the bivalent reference IgG antibody. In some embodiments, the EC₅₀ is at least two-fold, at least three-fold, at least four-fold, at least five-fold, at least ten-fold, at least twenty-fold, at least thirty-fold, at least forty-fold, or at least fifty-fold lower than the EC₅₀ of the bivalent reference IgG antibody.

[0143] Human coronaviruses are known to develop one or more mutations overtime that may alter the behavior of the virus. For example, SARS-CoV-2 has developed a spike mutant (D614G) that is believed to be more infectious than the original SARS-CoV-2 strain that does not contain this mutation (Korber et al. Cell 2020, DOI: 10.1016/j.cell.2020.06.043). D510G and I528T mutations in the MERS-CoV spike (S) protein can result in reduced binding to its receptor, DPP4, resulting in a reduction in a reduction in levels of viral entry into cells having low levels of DPP4 (Kleine-Weber et al., J. Virol. 2019).

[0144] A reference precursor SARS-CoV S protein (UniProtKB—P59594 (SPIKE_SARS)) is presented herein as SEQ ID NO: 16. Myriad variant SARS CoV S proteins have been sequenced and are available in the literature but share the common structure of SEQ ID NO: 16. As reported in UniProtKB, the signal peptide of the precursor SARS-CoV S protein corresponds to amino acids 1 to 13 of SEQ ID NO: 16, the mature SARS-CoV S protein corresponds to amino acids 14 to 1255 of SEQ ID NO: 16, the S1 region of the SARS-CoV S protein corresponds to amino acids 14 to 667 of SEQ ID NO: 16, the S2 region of the SARS-CoV S protein corresponds to amino acids 668 to 1255 of SEQ ID NO: 16, the receptor binding domain (RBD) of the SARS-CoV S protein corresponds to amino acids 306 to 527 of SEQ ID NO: 16 (underlined below), the receptor binding motif of the SARS-CoV S protein corresponds to amino acids 424 to 494 of SEQ ID NO: 16, the extracellular domain of the SARS-CoV S protein corresponds to amino acids 14 to 1195 of SEQ ID NO: 16, the transmembrane domain of the SARS-CoV S protein corresponds to amino acids 1196 to 1216 of SEQ ID NO: 16, and the cytoplasmic domain of the SARS-CoV S protein corresponds to amino 1214 to 1255 of SEQ ID NO: 16. As persons of ordinary skill in the art will recognize, the RBD of various SARS-CoV S proteins present in the environment have mutated so an RBD that “corresponds” to amino acids 306 to 527 of SEQ ID NO: 16 may not be identical to amino acids 306 to 527 of SEQ ID NO: 16. The TMPRSS2 or furin cleavage site between the S1 and S2 subunits is between amino acids 667 and 668 of SEQ ID NO: 16.

### SEQ ID NO: 16: SARS-CoV Spike Protein, UniProt: P59594

```
      1 MEIFLLFLTL TSGSDLDRCT TFDDVQAPNY TQHTSSMRGV YYPDEIFRSD TLYLTQDLFL
    61 PFYSNVTGFH TINHTFGNPV IPFKDGIYFA ATEKSNVVRG WVFGSTMNNK SQSVIIINNS
  121 TNVVIRACNF ELCDNPFFAV SKPMGTQTHT MIFDNAFNCT FEYISDAFSL DVSEKSGNFK
  181 HLREFVFKNK DGFLYVYKGY QPIDVVRDLP SGFNTLKPIF KLPLGINITN FRAILTAFSP
  241 AQDIWGTSAA AYFVGYLKPT TFMLKYDENG TITDAVDCSQ NPLAELKCSV KSFEIDKGIY
  301 QTSNFRVVPS GDVVRFPNIT NLCPFGEVFN ATKFPSVYAW ERKKISNCVA DYSVLYNSTF
  361 FSTFKCYGVS ATKLNDLCFS NVYADSFVVK GDDVRQIAPG QTGVIADYNY KLPDDFMGCV
  421 LAWNTRNIDA TSTGNYNYKY RYLRHGKLRP FERDISNVPF SPDGKPCTPP ALNCYWPLND
  481 YGFYTTTGIG YQPYRVVVLS FELLNAPATV CGPKLSTDLI KNQCVNFNFN GLTGTGVLTP
  541 SSKRFQPFQQ FGRDVSDFTD SVRDPKTSEI LDISPCSFGG VSVITPGTNA SSEVAVLYQD
  601 VNCTDVSTAI HADQLTPAWR IYSTGNNVFQ TQAGCLIGAE HVDTSYECDI PIGAGICASY
  661 HTVSLLRSTS QKSIVAYTMS LGADSSIAYS NNTIAIPTNF SISITTEVMP VSMAKTSVDC
  721 NMYICGDSTE CANLLLQYGS FCTQLNRALS GIAAEQDRNT REVFAQVKQM YKTPTLKYFG
  781 GFNFSQILPD PLKPTKRSFI EDLLFNKVTL ADAGFMKQYG ECLGDINARD LICAQKFNGL
  841 TVLPPLLTDD MIAAYTAALV SGTATAGWTF GAGAALQIPF AMQMAYRFNG IGVTQNVLYE
  901 NQKQIANQFN KAISQIQESL TTTSTALGKL QDVVNQNAQA LNTLVKQLSS NFGAISSVLN
  961 DILSRLDKVE AEVQIDRLIT GRLQSLQTYV TQQLIRAAEI RASANLAATK MSECVLGQSK
1021 RVDFCGKGYH LMSFPQAAPH GVVFLHVTYV PSQERNFTTA PAICHEGKAY FPREGVFVFN
1081 GTSWFITQRN FFSPQIITTD NTFVSGNCDV VIGIINNTVY DPLQPELDSF KEELDKYFKN
1141 HTSPDVDLGD ISGINASVVN IQKEIDRLNE VAKNLNESLI DLQELGKYEQ YIKWPWYVWL
1201 GFIAGLIAIV MVTILLCCMT SCCSCLKGAC SCGSCCKFDE DDSEPVLKGV KLHYT
```

[0146] A reference precursor SARS-CoV-2 S protein (UniProtKB—P0DTC2 (SPIKE_SARS2)) is presented herein as SEQ ID NO: 17. Myriad variant SARS CoV-2 S proteins have been sequenced and are available in the literature but share the common structure of SEQ ID NO: 17. As reported in UniProtKB, the signal peptide of the precursor SARS-CoV-2 S protein corresponds to amino acids 1 to 12 of SEQ ID NO: 17, the mature SARS-CoV-2 S protein corresponds to amino acids 13 to 1273 of SEQ ID NO: 17, the S1 region of the SARS-CoV-2 S protein corresponds to amino acids 13 to 685 of SEQ ID NO: 17, the S2 region of the SARS-CoV-2 S protein corresponds to amino acids 686 to 1273 of SEQ ID NO: 17, the receptor binding domain (RBD) of the SARS-CoV-2 S protein corresponds to amino acids 319 to 541 of SEQ ID NO: 17 (underlined below, Yan, R. et al., Science 367:1444-1448 (2020)), the receptor binding motif of the SARS-CoV-2 S protein corresponds to amino acids 437 to 508 of SEQ ID NO: 17, the extracellular domain of the SARS-CoV-2 S protein corresponds to amino acids 13 to 1213 of SEQ ID NO: 17, the transmembrane domain of the SARS-CoV-2 S protein corresponds to amino acids 1214 to 1234 of SEQ ID NO: 17, and the cytoplasmic domain of the SARS-CoV-2 S protein corresponds to amino 1235 to 1273 of SEQ ID NO: 17. As persons of ordinary skill in the art will recognize, the RBD of various SARS-CoV-2 S proteins present in the environment have mutated so an RBD that “corresponds” to amino acids 319 to 541 of SEQ ID NO: 17 may not be identical to amino acids 319 to 541 of SEQ ID NO: 17. The TMPRSS2 or furin cleavage site between the S1 and S2 subunits is between amino acids 685 and 686 of SEQ ID NO: 17 (Hoffmann, M. et al., Cell 181:271-280 (2020)).

### SEQ ID NO: 17: SARS-CoV-2 Spike Protein, UniProt: P0DTC2

```
      1 MFVFLVLLPL VSSQCVNLTT RTQLPPAYTN SFTRGVYYPD KVFRSSVLHS TQDLFLPFFS
    61 NVTWFHAIHV SGTNGTKRFD NPVLPFNDGV YFASTEKSNI IRGWIFGTTL DSKTQSLLIV
  121 NNATNVVIKV CEFQFCNDPF LGVYYHKNNK SWMESEFRVY SSANNCTFEY VSQPFLMDLE
  181 GKQGNFKNLR EFVFKNIDGY FKIYSKHTPI NLVRDLPQGF SALEPLVDLP IGINITRFQT
  241 LLALHRSYLT PGDSSSGWTA GAAAYYVGYL QPRTFLLKYN ENGTITDAVD CALDPLSETK
  301 CTLKSFTVEK GIYQTSNFRV QPTESIVRFP NITNLCPFGE VFNATRFASV YAWNRKRISN
  361 CVADYSVLYN SASFSTFKCY GVSPIKLNDL CFTNVYADSF VIRGDEVRQI APGQTGKIAD
  421 YNYKLPDDFT GCVIAWNSNN LDSKVGGNYN YLYRLFRKSN LKPFERDIST EIYQAGSTPC
  481 NGVEGFNCYF PLQSYGFQPT NGVGYQPYRV VVLSFELLHA PATVCGPKKS TNLVKNKCVN
  541 FNFNGLTGTG VLTESNKKFL PFQQFGRDIA DTTDAVRDPQ TLEILDITPC SFGGVSVITP
  601 GINTSNQVAV LYQDVNCTEV PVAIHADQLT PTWRVYSTGS NVFQTRAGCL IGAEHVNNSY
  661 ECDIPIGAGI CASYQTQTNS PRRAPSVASQ SIIAYTMSLG AENSVAYSNN SIAIPTNFTI
  721 SVTTEILPVS MTKTSVDCTM YICGDSTECS NLLLQYGSFC TQLNRALTGI AVEQDKNTQE
  781 VFAQVKQIYK TPPIKDFGGF NFSQILPDPS KPSKRSFIED LLFNKVTLAD AGFIKQYGDC
  841 LGDIAARDLI CAQKENGLTV LPPLLTDEMI AQYTSALLAG TITSGWTFGA GAALQIPFAM
  901 QMAYRFNGIG VTQNVLYENQ KLIANQFNSA IGKIQDSLSS TASALGKLQD VVNQNAQALN
  961 TLVKQLSSNF GAISSVLNDI LSRLDKVEAE VQIDRLITGR LQSLQTYVTQ QLIRAAEIRA
1021 SANLAATKMS ECVLGQSKRV DFCGKGYHLM SFPQSAPHGV VFLHVTYVPA QEKNFTTAPA
1081 ICHDGKAHFP REGVFVSNGT HWFVTQRNFY EPQIITTDNT FVSGNCDVVI GIVNNTVYDP
1141 LQPELDSFKE ELDKYFKNHT SPDVDLGDIS GINASVVNIQ KEIDRLNEVA KNLNESLIDL
1201 QELGKYEQYI KWPWYIWLGF IAGLIAIVMV TIMLCCMTSC CSCLKGCCSC GSCCKFDEDD
1261 SEPVLKGVKL HYT
```

[0148] A reference precursor MERS-CoV S protein (UniProtKB—K9N5Q8 (SPIKE_MERS1)) is presented herein as SEQ ID NO: 18. Myriad variant MERS-CoV S proteins have been sequenced and are available in the literature but share the common structure of SEQ ID NO: 18. As reported in UniProtKB, the signal peptide of the precursor MERS-CoV S protein corresponds to amino acids 1 to 17 of SEQ ID NO: 18, the mature MERS-CoV S protein corresponds to amino acids 18 to 1353 of SEQ ID NO: 18, the S1 region of the MERS-CoV S protein corresponds to amino acids 18 to 751 of SEQ ID NO: 18, the S2 region of the MERS-CoV S protein corresponds to amino acids 752 to 1353 of SEQ ID NO: 18, the receptor binding domain (RBD) of the MERS-CoV S protein corresponds to amino acids 367 to 606 of SEQ ID NO: 18 (underlined below, Wang, et al., Cell Res. 23:986-993 (2013)), the extracellular domain of the MERS-CoV S protein corresponds to amino acids 18 to 1296 of SEQ ID NO: 18, the transmembrane domain of the MERS-CoV S protein corresponds to amino acids 1297 to 1317 of SEQ ID NO: 18, and the cytoplasmic domain of the MERS-CoV S protein corresponds to amino 1318 to 1353 of SEQ ID NO: 18. As persons of ordinary skill in the art will recognize, the RBD of various MERS-CoV S proteins present in the environment have mutated so an RBD that “corresponds” to amino acids 367 to 606 of SEQ ID NO: 18 may not be identical to amino acids 367 to 606 of SEQ ID NO: 18. The furin cleavage site between the S1 and S2 subunits is between amino acids 751 and 752 of SEQ ID NO: 18.

### SEQ ID NO: 18: MERS-CoV Spike Protein, UniProt: K9N5Q8

```
      1 MIHSVFLLMF LLTPTESYVD VGPDSVKSAC IEVDIQQTFF DKTWPRPIDV SKADGIIYPQ
    61 GRTYSNITIT YQGLFPYQGD HGDMYVYSAG HATGTTPQKL FVANYSQDVK QFANGFVVRI
  121 GAAANSTGTV IISPSTSATI RKIYPAFMLG SSVGNFSDGK MGRFFNHTLV LLPDGCGTLL
  181 RAFYCILEPR SGNHCPAGNS YTSFATYHTP ATDCSDGNYN RNASLNSFKE YFNLRNCTFM
  241 YTYNITEDEI LEWFGITQTA QGVHLFSSRY VDLYGGNMFQ FATLPVYDTI KYYSIIPHSI
  301 RSIQSDRKAW AAFYVYKLQP LTFLLDFSVD GYIRRAIDCG FNDLSQLHCS YESFDVESGV
  361 YSVSSFEAKP SGSVVEQAEG VECDFSPLLS GTPPQVYNFK RLVFTNCNYN LTKLLSLFSV
  421 NDFTCSQISP AAIASNCYSS LILDYFSYPL SMKSDLSVSS AGPISQFNYK QSFSNPTCLI
  481 LATVPHNLTT ITKPLKYSYI NKCSRFLSDD RTEVPQLVNA NQYSPCVSIV PSTVWEDGDY
  541 YRKQLSPLEG GGWLVASGST VAMTEQLQMG FGITVQYGTD TNSVCPKLEF ANDTKIASQL
  601 GNCVEYSLYG VEGRGVFQNC TAVGVRQQRF VYDAYQNLVG YYSDDGNYYC LRACVSVPVS
  661 VIYDKETKTH ATLFGSVACE HISSTMSQYS RSTRSMLKRR DSTYGPLQTP VGCVLGLVNS
  721 SLFVEDCKLP LGQSLCALPD TPSTLTPRSV RSVPGEMRLA SIAFNHPIQV DQLNSSYFKL
  781 SIPTNFSFGV TQEYIQTTIQ KVTVDCKQYV CNGFQKCEQL LREYGQFCSK INQALHGANL
  841 RQDDSVRNLF ASVKSSQSSP IIPGFGGDFN LTLLEPVSIS TGSRSARSAI EDLLFDKVTI
  901 ADPGYMQGYD DCMQQGPASA RDLICAQYVA GYKVLPPLMD VNMEAAYTSS LLGSIAGVGW
  961 TAGLSSFAAI PFAQSIFYRL NGVGITQQVL SENQKLIANK FNQALGAMQT GETTTNEAFH
1021 KVQDAVNNNA QALSKLASEL SNTFGAISAS IGDIIQRLDV LEQDAQIDRL INGRLTTLNA
1081 FVAQQLVRSE SAALSAQLAK DKVNECVKAQ SKRSGFCGQG THIVSFVVNA PNGLYFMHVG
1141 YYPSNHIEVV SAYGLCDAAN PTNCIAPVNG YFIKTNNTRI VDEWSYTGSS FYAPEPITSL
1201 NTKYVAPQVT YQNISTNLPP PLLGNSTGID FQDELDEFFK NVSTSIPNFG SLTQINTTLL
1261 DLTYEMLSLQ QVVKALNESY IDLKELGNYT YYNKWPWYIW LGFIAGLVAL ALCVFFILCC
1321 TGCGTNCMGK LKCNRCCDRY EEYDLEPHKV HVH
```

[0150] Human coronaviruses are known to develop one or more mutations, particularly in the receptor binding domain (RBD) of the spike (S) protein over time that may alter the behavior of the virus. The SARS-CoV-2 variants are identified, for example, by nomenclature referred to as “pango” lineages (Rambaut, A., et al., Nature Microbiol. 5:1403-1407 (2020)), and have been assigned Greek letter nomenclature by the World Health Organization (who.int/en/activities/tracking-SARS-CoV-2-variants/). SARS CoV-2 variants of clinical relevance are cataloged by the Centers for Disease Control, e.g., at cdc.gov/coronavirus/2019-ncov/variants/variant-info.html (last visited Jul. 5, 2021). The CDC catalog is updated regularly. Those of skill in the art will understand that these lineages do not correspond to exact sequences and are generally characterized by the amino acid variations noted below, particularly in the RBD region, but may be mixtures and may include additional or fewer amino acid deletions, insertions, and/or substitutions relative to SEQ ID NO: 17.

[0151] For example, the pango lineage B.1.1.7 or WHO “Alpha” variant first identified in the UK includes an RBD substitution of tyrosine (Y) for asparagine (N) at a position corresponding to amino acid 501 in SEQ ID NO: 17, and can include additional spike protein alterations such as amino acid deletions at positions corresponding to amino acids 69, 70, and 144 of SEQ ID NO: 17, and amino acid substitutions A570D, D614G, P681H, T716I, S982A, D1118H corresponding to the indicated positions in SEQ ID NO: 17. By “an amino acid corresponding to amino acid 501 in SEQ ID NO: 17 (and other spike protein mutations described herein) is meant the amino acid in the sequence of any given SARS-CoV-2 spike protein, which is homologous to N501 in SEQ ID NO: 17. Variant viruses carrying this “N501Y” mutation have been shown to be more highly transmissible than the non-variant virus. See Leung, K., et al., Euro Surveill. 26:2002106. doi: 10.2807/1560-7917.ES.2020.26.1.2002106 (2021).

[0152] The pango lineage B.1.351 or WHO “Beta” variant first identified in South Africa includes K417N, E484K and N501Y RBD substitutions corresponding to the indicated positions in SEQ ID NO: 17 and can include additional spike protein substitutions such as D80A, D215G, D614G, and A701V and amino acid deletions corresponding to amino acids 241-243 (all positions corresponding to SEQ ID NO: 17). This variant is likewise believed to be more highly transmissible. See Wibmer, C K et al., Nature Med.: 27:622-625, doi: 10.1038/s41591-021-01285-x (2021).

[0153] The pango lineage P.1 or WHO “Gamma” variant first identified in Brazil includes K417T, E484K, and N501Y RBD substitutions corresponding to the indicated positions in SEQ ID NO: 17 and can include additional spike protein substitutions such as L18F, T20N, P26S, D138Y, R190S, D614G, H655Y, and T10271 (all positions corresponding to SEQ ID NO: 17). This variant again is believed to be more highly transmissible. See Faria, Nuno R., et al., Virological (2021) (available at icpcovid.com, visited Feb. 19, 2021). Additionally, a SARS-CoV-2 variant with a D614G mutation is believed to have increased infectivity and transmissibility (Korber B., et al., Cell 182:812-827 (2020)).

[0154] The pango lineage B.1.525 or WHO “Eta” variant first identified in Nigeria includes an E484K RBD substitution corresponding to the indicated position in SEQ ID NO: 17 and can include additional spike protein alterations such as amino acid deletions at positions corresponding to amino acids 69, 70, and 144 of SEQ ID NO: 17, and spike protein substitutions Q52R, A67V, D614G, Q677H, F888L (all positions corresponding to SEQ ID NO: 17).

[0155] The pango lineage B.1.617.1 or WHO “Kappa” variant first identified in India includes L452R and E484Q RBD substitutions corresponding to the indicated positions in SEQ ID NO: 17 and can include spike protein substitutions such as G142D, E154K, D614G, P681R, Q1071H, and H1101D (all positions corresponding to SEQ ID NO: 17).

[0156] The pango lineage B.1.617.2 or WHO “Delta” variant first identified in India includes L452R and T478K RBD substitutions corresponding to the indicated positions in SEQ ID NO: 17 and can include additional spike protein substitutions such as T19R, G142D, D614G, P681R, and D950N (all positions corresponding to SEQ ID NO: 17). A newly-emerging Delta variant, designated “Delta Plus” or Pango lineage B.1.617.2/AY.1 further includes a K417N substitution corresponding to SEQ ID NO: 17.

[0157] The pango lineage B.1.617.2.v2 variant first identified in India includes L452R and T478K RBD substitutions corresponding to the indicated positions in SEQ ID NO: 17 and can include additional spike protein alterations such as amino acid deletions at positions corresponding to amino acids 157 and 158 of SEQ ID NO: 17, and spike protein substitutions such as T19R, G142D, E156G, D614G, P681R, and D950N (all positions corresponding to SEQ ID NO: 17).

[0158] The pango lineage B.1.618 variant first identified in India includes an E484K RBD substitution corresponding to the indicated position in SEQ ID NO: 17 and can include additional spike protein alterations such as amino acid deletions at positions corresponding to amino acids 145 and 146 of SEQ ID NO: 17, and spike protein substitutions such as H49Y and D614G (all positions corresponding to SEQ ID NO: 17).

[0159] Of particular concern is the potential development of escape mutations that can reduce or prevent neutralization by a therapy, such as an antibody therapy. The multimeric binding molecules disclosed herein may be able to maintain the ability to bind and neutralize strains of the human coronavirus that are escape mutants for the corresponding IgG antibody. Additionally, the multimeric binding molecules disclosed herein may be less prone to generating escape mutants. Accordingly, in certain embodiments, the human coronavirus, e.g., SARS-CoV-2, is a reference IgG antibody escape mutant.

[0160] Prevalent SARS-CoV-2 escape mutations include, without limitation, N439K, Y453F, S477N, and N501Y, which are four prevalent RBD mutations in circulation and are associated with resistance to several neutralizing mAbs (Thomson, E. C., et al. Cell 184: 1171-1187 (2021); Liu, Z., et al. bioRxiv doi: 10.2139/ssrn.3725763 (2020); Weisblum, Y., et al., eLife 9:e61312 doi: 10.7554/eLife.61312 (Oct. 28, 2020); Hayashi et al. medRxiv doi: 10.1101/2021.01.28.21250577). Other RBD mutations are associated with resistance to three approved mAbs, Bamlanivimab (E484K, F490S, Q493R, S494P), Casivirivimab (REGN-10933, K417E, Y453F, L455F, G476S, F486V, Q493K) and Imdevimab (REGN-10987, K444Q, V445A, G446V) (Fact Sheet for Health Care Providers Emergency Use Authorization (EUA) of Bamlanivimab, (2020); Fact Sheet for Health Care Providers Emergency Use Authorization (EUA) Of Casirivimab and Imdevimab, (2020), both available at fda.gov (visited Jan. 25, 2021).

[0161] Exemplary escape mutations in the SARS-CoV S protein corresponding to SEQ ID NO: 16 that block neutralization by selected SARS-CoV antibodies are identified, e.g., in Rockx, B., et al. J. Infect. Dis. 201:946-955 (2010), and Sui, et al., J. Virol. 88:13769-13780 (2014).

[0162] Exemplary MERS-CoV escape mutations in the MERS-CoV S protein corresponding to SEQ ID NO: 18 that block neutralization by selected MERS-CoV antibodies are identified, e.g., in Kleine Weber et al., J. Virol. 93(2):e01381-18 (2019).

[0163] Antibody-dependent enhancement (ADE) of diseases caused by human coronaviruses is a concern (Houser, K. V., et al., PLoS Pathog. 13: Article e1006565 (2017) (MERS-CoV); Weiss, R. C., and F. W. Scott Comp. Immunol. Microbiol. Infect. Dis 4:175-189 (1981) (feline infectious peritonitis virus); and Kam, Y. W., et al., Vaccine 25:729-740 (2007) (SARS-CoV)). It is believed that Fcγ receptors may mediate antibody dependent entry into cells (Kam et al., supra). Fcγ receptors do not bind IgA or IgM antibodies. Accordingly, the multimeric binding molecules disclosed herein can have a reduced risk of ADE than the reference IgG antibody. In some embodiments, the multimeric binding molecule cannot cause ADE.

[0164] As the terms “SARS” and “MERS” imply, infection with SARS-CoV, SARS-CoV-2, and MERS-CoV often leads to severe respiratory symptoms. These respiratory symptoms make the respiratory mucosa an important tissue to target for any molecule developed to treat or prevent SARS, COVID-19, or MERS; however, the epithelium often prevents the transcytosis of therapeutics such as IgG antibodies. By contrast, polymeric immunoglobulin receptors (pIgR) on the epithelium bind the J-chain of IgA and IgM antibodies and transports the molecules across the epithelia to the mucosa. During this process, the process, the extracellular region of pIgR is cleaved and is then termed the secretory component. Accordingly, in some embodiments, the multimeric binding molecule can transport across vascular endothelial cells via J-chain binding to the polymeric Ig receptor (PIgR). It is believed that recombinant secretory component can also facilitate transcytosis of J-chain comprising molecules to the mucosa. Accordingly, in some embodiments, the multimeric binding molecule comprises a secretory component, or fragment or variant thereof. In some embodiments, the multimeric binding molecule comprises a secretory component.

[0165] In certain embodiments, the binding molecule is more potent than a bivalent reference IgG antibody comprising two of the human coronavirus, e.g., SARS-CoV, SARS-CoV-2 or MERS-CoV, binding domains. In some embodiments, the binding molecule neutralizes human coronavirus, e.g., SARS-CoV, SARS-CoV-2 or MERS-CoV infectivity at a lower 50% effective concentration (EC₅₀) than the bivalent reference IgG antibody. In some embodiments, the EC₅₀ is at least two-fold, at least three-fold, at least four-fold, at least five-fold, at least ten-fold, at least twenty-fold, at least thirty-fold, at least forty-fold, at least fifty-fold, at least seventy-five-fold, at least 100-fold, at least 200-fold, at least 300-fold, at least 400-fold, at least 500-fold, at least 750-fold or at least 1000-fold lower than the EC₅₀ of the bivalent reference IgG antibody.

[0166] In some embodiments, the multimeric binding molecule reduces, inhibits, or blocks the human coronavirus, e.g., SARS-CoV or SARS-CoV-2 from binding to its receptor, e.g., angiotensin-converting enzyme 2 (ACE2). In some embodiments, the multimeric binding molecule reduces, inhibits, or blocks the human coronavirus, e.g., MERS-CoV binding to its receptor, e.g., dipeptidyl peptidase 4 (DPP4). In some embodiments, the multimeric binding molecule reduces, inhibits, or blocks the human coronavirus binding to its receptor more than a bivalent reference IgG antibody comprising two of the human coronavirus, e.g., SARS-CoV, SARS-CoV-2 or MERS-CoV, binding domains. In some embodiments, the multimeric binding molecule reduces, inhibits, or blocks SARS-CoV or SARS-CoV2 binding to ACE2 more than a bivalent reference IgG antibody comprising two of the human coronavirus, e.g., SARS-CoV or SARS-CoV-2, binding domains. In some embodiments, the multimeric binding molecule reduces, inhibits, or blocks MERS-CoV binding to DPP4 more than a bivalent reference IgG antibody comprising two of the human coronavirus, e.g., MERS-CoV, binding domains. In some embodiments, the binding molecule inhibits human coronavirus, e.g., SARS-CoV-2 binding to its receptor, e.g., ACE2, at a lower 50% inhibitory concentration (IC₅₀) than the bivalent reference IgG antibody. In some embodiments, the binding molecule inhibits human coronavirus, e.g., MERS-CoV binding to its receptor, e.g., DPP4, at a lower 50% inhibitory concentration (IC₅₀) than the bivalent reference IgG antibody. In some embodiments, the IC₅₀ is at least two-fold, at least three-fold, at least four-fold, at least five-fold, at least ten-fold, at least twenty-fold, at least thirty-fold, at least forty-fold, at least fifty-fold, at least seventy-five-fold, at least 100-fold, at least 200-fold, at least 300-fold, at least 400-fold, at least 500-fold, at least 750-fold or at least 1000-fold lower than the IC₅₀ of the bivalent reference IgG antibody.

[0167] In some embodiments, the multimeric binding molecules are dimeric and comprise two bivalent binding units or variants or fragments thereof. In some embodiments, the multimeric binding molecules are dimeric, comprise two bivalent binding units or variants or fragments thereof, and further comprise a J-chain or functional fragment or variant thereof as described herein. In some embodiments, the multimeric binding molecules are dimeric, comprise two bivalent binding units or variants or fragments thereof, and further comprise a J-chain or functional fragment or variant thereof as described herein, where each binding unit comprises two IgA heavy chain constant regions or multimerizing fragments or variants thereof.

[0168] In some embodiments, the multimeric binding molecules are tetrameric and comprise four bivalent binding units or variants or fragments thereof. In some embodiments, the multimeric binding molecules are tetrameric, comprise four bivalent binding units or variants or fragments thereof, and further comprise a J-chain or functional fragment or variant thereof as described herein. In some embodiments, the multimeric binding molecules are tetrameric, comprise four bivalent binding units or variants or fragments thereof, and further comprise a J-chain or functional fragment or variant thereof as described herein, where each binding unit comprises two IgA heavy chain constant regions or multimerizing fragments or variants thereof.

[0169] In some embodiments, the multimeric binding molecules are pentameric and comprise five bivalent binding units or variants or fragments thereof. In some embodiments, the multimeric binding molecules are pentameric and comprise five bivalent binding units or variants or fragments thereof, and further comprise a J-chain or functional fragment or variant thereof as described herein. In some embodiments, the multimeric binding molecules are pentameric and comprise five bivalent binding units or variants or fragments thereof, and further comprise a J-chain or functional fragment or variant thereof as described herein, where each binding unit comprises two IgM heavy chain constant regions or multimerizing fragments or variants thereof.

[0170] In some embodiments, the multimeric binding molecules are hexameric and comprise six bivalent binding units or variants or fragments thereof. In some embodiments, the multimeric binding molecules are hexameric and comprise six bivalent binding units or variants or fragments thereof, and where each binding unit comprises two IgM heavy chain constant regions or multimerizing fragments or variants thereof.

[0171] In certain embodiments, heavy chain constant regions in the provided binding molecules are each associated with a binding domain, e.g., an antibody antigen-binding domain, e.g., a scFv, a VHH or the VH subunit of an antibody antigen-binding domain. The multimeric binding molecule disclosed herein can comprise three to twelve binding domains that are human coronavirus, e.g., SARS-CoV, SARS-CoV-2 or MERS-CoV binding domains. In some embodiments, the multimeric binding molecule, such as an IgA antibody, an IgA-like antibody, or an IgA-derived binding molecule comprises three to eight binding domains that specifically bind to the human coronavirus, e.g., SARS-CoV, SARS-CoV-2 or MERS-CoV. In some embodiments, the multimeric binding molecule, such as an IgA antibody, an IgA-like antibody, or an IgA-derived binding molecule comprises four binding domains that specifically bind to the human coronavirus, e.g., SARS-CoV, SARS-CoV-2 or MERS-CoV. In some embodiments, the multimeric binding molecule, such as an IgA antibody, an IgA-like antibody, or an IgA-derived binding molecule comprises eight binding domains that specifically bind to the human coronavirus, e.g., SARS-CoV, SARS-CoV-2 or MERS-CoV. In some embodiments, the multimeric binding molecule, such as an IgM antibody, an IgM-like antibody, or an IgM-derived binding molecule comprises ten or twelve binding domains that specifically bind to the human coronavirus, e.g., SARS-CoV, SARS-CoV-2 or MERS-CoV.

[0172] In certain embodiments, the provided multimeric binding molecule is multispecific, e.g., bispecific, trispecific, or tetraspecific, where two or more binding domains associated with the heavy chain constant regions of the binding molecule specifically bind to different targets. In certain embodiments, the binding domains of the multimeric binding molecule all specifically bind to the human coronavirus, e.g., SARS-CoV, SARS-CoV-2 or MERS-CoV. In certain embodiments, the binding domains of the multimeric binding molecule are identical. In such cases, the multimeric binding molecule can still be bispecific, if, for example, a binding domain with a different specificity is part of a modified J-chain as described elsewhere herein. In certain embodiments, the binding domains are antibody-derived antigen-binding domains, e.g., a scFv associated with the heavy chain constant regions or a VH subunit of an antibody binding domain associated with the heavy chain constant regions.

[0173] For example, in some embodiments, the provided multimeric binding molecule binds a conserved, or highly conserved, cryptic receptor binding domain epitope and cross-reacts or binds spike protein epitopes of all human corona viruses. See, e.g., Tortorici et al., Nature, (2021) doi: 10.1038/s41586-021-03817-4. In some embodiments, the multimeric binding protein that binds all human coronaviruses comprise a heavy chain variable region (VH) and a light chain variable region (VL), wherein the VH and VL comprise six immunoglobulin complementarity determining regions HCDR1, HCDR2, HCDR3, LCDR1, LCDR2, and LCDR3 comprise the CDRs of an antibody comprising the VH and VL of SEQ ID NOS:384 and 385. In some embodiments the multimeric binding protein that binds all human coronaviruses is an IgM antibody. In some embodiments the IgM antibody comprises a modified or variant J-chain. In some embodiments the multimeric binding protein that binds all human coronaviruses is an IgA antibody.

[0174] In certain embodiments, each binding unit comprises two heavy chains each comprising a VH situated amino terminal to the heavy chain constant region, and two immunoglobulin light chains each comprising a light chain variable domain (VL) situated amino terminal to an immunoglobulin light chain constant region, e.g., a kappa or lambda constant region. The provided VH and VL combine to form an antigen-binding domain that specifically binds to the target. In certain embodiments each antigen-binding domain of each binding molecule binds to the human coronavirus, e.g., SARS-CoV, SARS-CoV-2 or MERS-CoV. In certain embodiments, each antigen-binding domain of each binding molecule is identical.

[0175] In certain embodiments, the three to twelve identical binding domains of the multimeric binding molecule that bind to SARS-CoV-2, comprise a heavy chain variable region (VH) and a light chain variable region (VL), where the VH and VL comprise six immunoglobulin complementarity determining regions HCDR1, HCDR2, HCDR3, LCDR1, LCDR2, and LCDR3, where the HCDR1, HCDR2, HCDR3, LCDR1, LCDR2, and LCDR3 comprise the CDRs of an antibody comprising the VH and VL of any of SEQ ID NO: 84 and SEQ ID NO: 85, SEQ ID NO: 86 and SEQ ID NO: 87, SEQ ID NO: 88 and SEQ ID NO: 89, SEQ ID NO: 90 and SEQ ID NO: 91, SEQ ID NO: 92 and SEQ ID NO: 93, SEQ ID NO: 94 and SEQ ID NO: 95, SEQ ID NO: 96 and SEQ ID NO: 97, SEQ ID NO: 98 and SEQ ID NO: 99, SEQ ID NO: 100 and SEQ ID NO: 101, SEQ ID NO: 102 and SEQ ID NO: 103, SEQ ID NO: 104 and SEQ ID NO: 105, SEQ ID NO: 106 and SEQ ID NO: 107, SEQ ID NO: 108 and SEQ ID NO: 109, SEQ ID NO: 110 and SEQ ID NO: 111, SEQ ID NO: 112 and SEQ ID NO: 113, SEQ ID NO: 114 and SEQ ID NO: 115, SEQ ID NO: 116 and SEQ ID NO: 117, SEQ ID NO: 118 and SEQ ID NO: 119, SEQ ID NO: 120 and SEQ ID NO: 121, SEQ ID NO: 122 and SEQ ID NO: 123, SEQ ID NO: 124 and SEQ ID NO: 125, SEQ ID NO: 126 and SEQ ID NO: 127, SEQ ID NO: 128 and SEQ ID NO: 129, SEQ ID NO: 130 and SEQ ID NO: 131, SEQ ID NO: 132 and SEQ ID NO: 133, SEQ ID NO: 134 and SEQ ID NO: 135, SEQ ID NO: 136 and SEQ ID NO: 137, SEQ ID NO: 138 and SEQ ID NO: 139, SEQ ID NO: 140 and SEQ ID NO: 141, SEQ ID NO: 142 and SEQ ID NO: 143, SEQ ID NO: 144 and SEQ ID NO: 145, SEQ ID NO: 146 and SEQ ID NO: 147, SEQ ID NO: 148 and SEQ ID NO: 149, SEQ ID NO: 150 and SEQ ID NO: 151, SEQ ID NO: 152 and SEQ ID NO: 153, SEQ ID NO: 154 and SEQ ID NO: 155, SEQ ID NO: 156 and SEQ ID NO: 157, SEQ ID NO: 158 and SEQ ID NO: 159, SEQ ID NO: 160 and SEQ ID NO: 161, SEQ ID NO: 162 and SEQ ID NO: 163, SEQ ID NO: 164 and SEQ ID NO: 165, SEQ ID NO: 166 and SEQ ID NO: 167, SEQ ID NO: 168 and SEQ ID NO: 169, SEQ ID NO: 170 and SEQ ID NO: 171, SEQ ID NO: 172 and SEQ ID NO: 173, SEQ ID NO: 174 and SEQ ID NO: 175, SEQ ID NO: 176 and SEQ ID NO: 177, SEQ ID NO: 178 and SEQ ID NO: 179, SEQ ID NO: 180 and SEQ ID NO: 181, SEQ ID NO: 182 and SEQ ID NO: 183, SEQ ID NO: 184 and SEQ ID NO: 185, SEQ ID NO: 186 and SEQ ID NO: 187, SEQ ID NO: 188 and SEQ ID NO: 189, SEQ ID NO: 190 and SEQ ID NO: 191, SEQ ID NO: 192 and SEQ ID NO: 193, SEQ ID NO: 194 and SEQ ID NO: 195, SEQ ID NO: 196 and SEQ ID NO: 197, SEQ ID NO: 198 and SEQ ID NO: 199, SEQ ID NO: 200 and SEQ ID NO: 201, SEQ ID NO: 202 and SEQ ID NO: 203, SEQ ID NO: 204 and SEQ ID NO: 205, SEQ ID NO: 206 and SEQ ID NO: 207, SEQ ID NO: 208 and SEQ ID NO: 209, SEQ ID NO: 210 and SEQ ID NO: 211, SEQ ID NO: 212 and SEQ ID NO: 213, SEQ ID NO: 214 and SEQ ID NO: 215, SEQ ID NO: 216 and SEQ ID NO: 217, SEQ ID NO: 218 and SEQ ID NO: 219, SEQ ID NO: 220 and SEQ ID NO: 221, SEQ ID NO: 222 and SEQ ID NO: 223, SEQ ID NO: 224 and SEQ ID NO: 225, SEQ ID NO: 226 and SEQ ID NO: 227, SEQ ID NO: 228 and SEQ ID NO: 229, SEQ ID NO: 230 and SEQ ID NO: 231, SEQ ID NO: 232 and SEQ ID NO: 233, SEQ ID NO: 234 and SEQ ID NO: 235, SEQ ID NO: 236 and SEQ ID NO: 237, SEQ ID NO: 238 and SEQ ID NO: 239, SEQ ID NO: 240 and SEQ ID NO: 241, SEQ ID NO: 242 and SEQ ID NO: 243, SEQ ID NO: 244 and SEQ ID NO: 245, SEQ ID NO: 246 and SEQ ID NO: 247, SEQ ID NO: 248 and SEQ ID NO: 249, SEQ ID NO: 250 and SEQ ID NO: 251, SEQ ID NO: 252 and SEQ ID NO: 253, SEQ ID NO: 254 and SEQ ID NO: 255, SEQ ID NO: 256 and SEQ ID NO: 257, SEQ ID NO: 258 and SEQ ID NO: 259, SEQ ID NO: 260 and SEQ ID NO: 261, SEQ ID NO: 264 and SEQ ID NO: 265, SEQ ID NO: 266 and SEQ ID NO: 267, SEQ ID NO: 268 and SEQ ID NO: 269, SEQ ID NO: 270 and SEQ ID NO: 271, SEQ ID NO: 272 and SEQ ID NO: 273, SEQ ID NO: 274 and SEQ ID NO: 275, SEQ ID NO: 276 and SEQ ID NO: 277, SEQ ID NO: 278 and SEQ ID NO: 279, SEQ ID NO: 280 and SEQ ID NO: 281, SEQ ID NO: 282 and SEQ ID NO: 283, SEQ ID NO: 284 and SEQ ID NO: 285, SEQ ID NO: 286 and SEQ ID NO: 287, SEQ ID NO: 288 and SEQ ID NO: 289, SEQ ID NO: 290 and SEQ ID NO: 291, SEQ ID NO: 292 and SEQ ID NO: 293, SEQ ID NO: 294 and SEQ ID NO: 295, SEQ ID NO: 296 and SEQ ID NO: 297, SEQ ID NO: 298 and SEQ ID NO: 299, SEQ ID NO: 300 and SEQ ID NO: 301, SEQ ID NO: 302 and SEQ ID NO: 303, SEQ ID NO: 304 and SEQ ID NO: 305, SEQ ID NO: 306 and SEQ ID NO: 307, SEQ ID NO: 308 and SEQ ID NO: 309, SEQ ID NO: 310 and SEQ ID NO: 311, SEQ ID NO: 312 and SEQ ID NO: 313, SEQ ID NO: 314 and SEQ ID NO: 315, SEQ ID NO: 316 and SEQ ID NO: 317, SEQ ID NO: 318 and SEQ ID NO: 319, SEQ ID NO: 320 and SEQ ID NO: 321, SEQ ID NO: 322 and SEQ ID NO: 323, SEQ ID NO: 324 and SEQ ID NO: 325, SEQ ID NO: 326 and SEQ ID NO: 327, SEQ ID NO: 328 and SEQ ID NO: 329, SEQ ID NO: 330 and SEQ ID NO: 331, SEQ ID NO: 332 and SEQ ID NO: 333, SEQ ID NO: 336 and SEQ ID NO: 337, SEQ ID NO: 338 and SEQ ID NO: 339, SEQ ID NO: 340 and SEQ ID NO: 341, SEQ ID NO: 342 and SEQ ID NO: 343, SEQ ID NO: 344 and SEQ ID NO: 345, SEQ ID NO: 348 and SEQ ID NO: 349, SEQ ID NO: 350 and SEQ ID NO: 351, SEQ ID NO: 352 and SEQ ID NO: 353, SEQ ID NO: 354 and SEQ ID NO: 355, SEQ ID NO: 356 and SEQ ID NO: 357, SEQ ID NO: 358 and SEQ ID NO: 359, SEQ ID NO: 362 and SEQ ID NO: 363, SEQ ID NO: 364 and SEQ ID NO: 365, SEQ ID NO: 366 and SEQ ID NO: 367, SEQ ID NO: 368 and SEQ ID NO: 369, SEQ ID NO: 370 and SEQ ID NO: 371, SEQ ID NO: 372 and SEQ ID NO: 373, SEQ ID NO: 374 and SEQ ID NO: 375, SEQ ID NO: 376 and SEQ ID NO: 377, SEQ ID NO: 378 and SEQ ID NO: 379, SEQ ID NO: 380 and SEQ ID NO: 381, SEQ ID NO: 382 and SEQ ID NO: 383, SEQ ID NO: 384 and SEQ ID NO: 385, SEQ ID NO: 386 and SEQ ID NO: 387, SEQ ID NO: 388 and SEQ ID NO: 389, SEQ ID NO: 390 and SEQ ID NO: 391, SEQ ID NO: 392 and SEQ ID NO: 393, SEQ ID NO: 394 and SEQ ID NO: 395, SEQ ID NO: 396 and SEQ ID NO: 397, SEQ ID NO: 398 and SEQ ID NO: 399, SEQ ID NO: 400 and SEQ ID NO: 401, SEQ ID NO: 402 and SEQ ID NO: 403, SEQ ID NO: 404 and SEQ ID NO: 405, SEQ ID NO: 406 and SEQ ID NO: 407, SEQ ID NO: 408 and SEQ ID NO: 409, SEQ ID NO: 410 and SEQ ID NO: 411, SEQ ID NO: 412 and SEQ ID NO: 413, SEQ ID NO: 414 and SEQ ID NO: 415, SEQ ID NO: 416 and SEQ ID NO: 417, SEQ ID NO: 418 and SEQ ID NO: 419, SEQ ID NO: 420 and SEQ ID NO: 421, SEQ ID NO: 422 and SEQ ID NO: 423, SEQ ID NO: 424 and SEQ ID NO: 425, SEQ ID NO: 426 and SEQ ID NO: 427, SEQ ID NO: 428 and SEQ ID NO: 429, SEQ ID NO: 430 and SEQ ID NO: 431, SEQ ID NO: 432 and SEQ ID NO: 433, SEQ ID NO: 434 and SEQ ID NO: 435, SEQ ID NO: 436 and SEQ ID NO: 437, SEQ ID NO: 438 and SEQ ID NO: 439, SEQ ID NO: 440 and SEQ ID NO: 441, SEQ ID NO: 442 and SEQ ID NO: 443, SEQ ID NO: 444 and SEQ ID NO: 445, SEQ ID NO: 446 and SEQ ID NO: 447, SEQ ID NO: 448 and SEQ ID NO: 449, SEQ ID NO: 450 and SEQ ID NO: 451, SEQ ID NO: 452 and SEQ ID NO: 453, SEQ ID NO: 454 and SEQ ID NO: 455, SEQ ID NO: 456 and SEQ ID NO: 457, SEQ ID NO: 458 and SEQ ID NO: 459, SEQ ID NO: 460 and SEQ ID NO: 461, SEQ ID NO: 462 and SEQ ID NO: 463, SEQ ID NO: 464 and SEQ ID NO: 465, SEQ ID NO: 466 and SEQ ID NO: 467, SEQ ID NO: 468 and SEQ ID NO: 469, SEQ ID NO: 470 and SEQ ID NO: 471, SEQ ID NO: 472 and SEQ ID NO: 473, SEQ ID NO: 474 and SEQ ID NO: 475, SEQ ID NO: 476 and SEQ ID NO: 477, SEQ ID NO: 478 and SEQ ID NO: 479, SEQ ID NO: 480 and SEQ ID NO: 481, SEQ ID NO: 482 and SEQ ID NO: 483, SEQ ID NO: 484 and SEQ ID NO: 485, SEQ ID NO: 486 and SEQ ID NO: 487, SEQ ID NO: 488 and SEQ ID NO: 489, SEQ ID NO: 490 and SEQ ID NO: 491, SEQ ID NO: 492 and SEQ ID NO: 493, SEQ ID NO: 494 and SEQ ID NO: 495, SEQ ID NO: 496 and SEQ ID NO: 497, SEQ ID NO: 498 and SEQ ID NO: 499, SEQ ID NO: 500 and SEQ ID NO: 501, SEQ ID NO: 502 and SEQ ID NO: 503, SEQ ID NO: 504 and SEQ ID NO: 505, SEQ ID NO: 506 and SEQ ID NO: 507, SEQ ID NO: 508 and SEQ ID NO: 509, SEQ ID NO: 628 and SEQ ID NO: 629, SEQ ID NO: 630 and SEQ ID NO: 631, SEQ ID NO: 632 and SEQ ID NO: 633, SEQ ID NO: 634 and SEQ ID NO: 635, SEQ ID NO: 636 and SEQ ID NO: 637, SEQ ID NO: 638 and SEQ ID NO: 639, SEQ ID NO: 640 and SEQ ID NO: 641, SEQ ID NO: 642 and SEQ ID NO: 643, or SEQ ID NO: 644 SEQ ID NO: 645, SEQ ID NO: 646 and SEQ ID NO: 647, SEQ ID NO: 648 and SEQ ID NO: 649, SEQ ID NO: 650 and SEQ ID NO: 651, or SEQ ID NO: 652 and SEQ ID NO: 653, respectively with zero, one, or two single amino acid substitutions in one or more of the HCDRs or LCDRs.

[0176] In certain embodiments, the three to twelve identical binding domains of the multimeric binding molecule that specifically bind to a human coronavirus, e.g., SARS-CoV-2, comprise a heavy chain variable region (VH) and a light chain variable region (VL), where the VH and VL comprise six immunoglobulin complementarity determining regions HCDR1, HCDR2, HCDR3, LCDR1, LCDR2, and LCDR3, where the HCDR1, HCDR2, HCDR3, LCDR1, LCDR2, and LCDR3 comprise the CDRs of an antibody comprising the VH and VL of SEQ ID NO: 86 and SEQ ID NO: 87, SEQ ID NO: 88 and SEQ ID NO: 89, SEQ ID NO: 90 and SEQ ID NO: 91, SEQ ID NO: 92 and SEQ ID NO: 93, SEQ ID NO: 94 and SEQ ID NO: 95, SEQ ID NO: 96 and SEQ ID NO: 97, SEQ ID NO: 98 and SEQ ID NO: 99, SEQ ID NO: 100 and SEQ ID NO: 101, SEQ ID NO: 102 and SEQ ID NO: 103, SEQ ID NO: 106 and SEQ ID NO: 107, SEQ ID NO: 110 and SEQ ID NO: 111, SEQ ID NO: 118 and SEQ ID NO: 119, SEQ ID NO: 128 and SEQ ID NO: 129, SEQ ID NO: 130 and SEQ ID NO: 131, SEQ ID NO: 132 and SEQ ID NO: 133, SEQ ID NO: 134 and SEQ ID NO: 135, SEQ ID NO: 136 and SEQ ID NO: 137, SEQ ID NO: 142 and SEQ ID NO: 143, SEQ ID NO: 146 and SEQ ID NO: 147, SEQ ID NO: 150 and SEQ ID NO: 151, SEQ ID NO: 156 and SEQ ID NO: 157, SEQ ID NO: 160 and SEQ ID NO: 161, SEQ ID NO: 162 and SEQ ID NO: 163, SEQ ID NO: 164 and SEQ ID NO: 165, SEQ ID NO: 166 and SEQ ID NO: 167, SEQ ID NO: 168 and SEQ ID NO: 169, SEQ ID NO: 170 and SEQ ID NO: 171, SEQ ID NO: 172 and SEQ ID NO: 173, SEQ ID NO: 174 and SEQ ID NO: 175, SEQ ID NO: 176 and SEQ ID NO: 177, SEQ ID NO: 180 and SEQ ID NO: 181, SEQ ID NO: 182 and SEQ ID NO: 183, SEQ ID NO: 186 and SEQ ID NO: 187, SEQ ID NO: 188 and SEQ ID NO: 189, SEQ ID NO: 194 and SEQ ID NO: 195, SEQ ID NO: 200 and SEQ ID NO: 201, SEQ ID NO: 206 and SEQ ID NO: 207, SEQ ID NO: 208 and SEQ ID NO: 209, SEQ ID NO: 218 and SEQ ID NO: 219, SEQ ID NO: 220 and SEQ ID NO: 221, SEQ ID NO: 222 and SEQ ID NO: 223, SEQ ID NO: 224 and SEQ ID NO: 225, SEQ ID NO: 228 and SEQ ID NO: 229, SEQ ID NO: 230 and SEQ ID NO: 231, SEQ ID NO: 240 and SEQ ID NO: 241, SEQ ID NO: 244 and SEQ ID NO: 245, SEQ ID NO: 246 and SEQ ID NO: 247, SEQ ID NO: 256 and SEQ ID NO: 257, SEQ ID NO: 258 and SEQ ID NO: 259, SEQ ID NO: 260 and SEQ ID NO: 261, SEQ ID NO: 264 and SEQ ID NO: 265, SEQ ID NO: 266 and SEQ ID NO: 267, SEQ ID NO: 268 and SEQ ID NO: 269, SEQ ID NO: 270 and SEQ ID NO: 271, SEQ ID NO: 272 and SEQ ID NO: 273, SEQ ID NO: 274 and SEQ ID NO: 275, SEQ ID NO: 276 and SEQ ID NO: 277, SEQ ID NO: 278 and SEQ ID NO: 279, SEQ ID NO: 280 and SEQ ID NO: 281, SEQ ID NO: 282 and SEQ ID NO: 283, SEQ ID NO: 284 and SEQ ID NO: 285, SEQ ID NO: 286 and SEQ ID NO: 287, SEQ ID NO: 288 and SEQ ID NO: 289, SEQ ID NO: 290 and SEQ ID NO: 291, SEQ ID NO: 292 and SEQ ID NO: 293, SEQ ID NO: 294 and SEQ ID NO: 295, SEQ ID NO: 296 and SEQ ID NO: 297, SEQ ID NO: 298 and SEQ ID NO: 299, SEQ ID NO: 300 and SEQ ID NO: 301, SEQ ID NO: 302 and SEQ ID NO: 303, SEQ ID NO: 304 and SEQ ID NO: 305, SEQ ID NO: 306 and SEQ ID NO: 307, SEQ ID NO: 308 and SEQ ID NO: 309, SEQ ID NO: 310 and SEQ ID NO: 311, SEQ ID NO: 312 and SEQ ID NO: 313, SEQ ID NO: 314 and SEQ ID NO: 315, SEQ ID NO: 316 and SEQ ID NO: 317, SEQ ID NO: 318 and SEQ ID NO: 319, SEQ ID NO: 320 and SEQ ID NO: 321, SEQ ID NO: 322 and SEQ ID NO: 323, SEQ ID NO: 324 and SEQ ID NO: 325, SEQ ID NO: 326 and SEQ ID NO: 327, SEQ ID NO: 328 and SEQ ID NO: 329, SEQ ID NO: 330 and SEQ ID NO: 331, SEQ ID NO: 332 and SEQ ID NO: 333, SEQ ID NO: 336 and SEQ ID NO: 337, SEQ ID NO: 338 and SEQ ID NO: 339, SEQ ID NO: 340 and SEQ ID NO: 341, SEQ ID NO: 342 and SEQ ID NO: 343, SEQ ID NO: 344 and SEQ ID NO: 345, SEQ ID NO: 348 and SEQ ID NO: 349, SEQ ID NO: 350 and SEQ ID NO: 351, SEQ ID NO: 352 and SEQ ID NO: 353, SEQ ID NO: 354 and SEQ ID NO: 355, SEQ ID NO: 356 and SEQ ID NO: 357, SEQ ID NO: 358 and SEQ ID NO: 359, SEQ ID NO: 360 and SEQ ID NO: 361, SEQ ID NO: 362 and SEQ ID NO: 363, SEQ ID NO: 364 and SEQ ID NO: 365, SEQ ID NO: 366 and SEQ ID NO: 367, SEQ ID NO: 368 and SEQ ID NO: 369, SEQ ID NO: 370 and SEQ ID NO: 371, SEQ ID NO: 372 and SEQ ID NO: 373, SEQ ID NO: 374 and SEQ ID NO: 375, SEQ ID NO: 376 and SEQ ID NO: 377, SEQ ID NO: 378 and SEQ ID NO: 379, SEQ ID NO: 380 and SEQ ID NO: 381, SEQ ID NO: 382 and SEQ ID NO: 383, SEQ ID NO: 384 and SEQ ID NO: 385, SEQ ID NO: 386 and SEQ ID NO: 387, SEQ ID NO: 388 and SEQ ID NO: 389, SEQ ID NO: 390 and SEQ ID NO: 391, SEQ ID NO: 392 and SEQ ID NO: 393, SEQ ID NO: 394 and SEQ ID NO: 395, SEQ ID NO: 396 and SEQ ID NO: 397, SEQ ID NO: 398 and SEQ ID NO: 399, SEQ ID NO: 400 and SEQ ID NO: 401, SEQ ID NO: 402 and SEQ ID NO: 403, SEQ ID NO: 404 and SEQ ID NO: 405, SEQ ID NO: 406 and SEQ ID NO: 407, SEQ ID NO: 408 and SEQ ID NO: 409, SEQ ID NO: 410 and SEQ ID NO: 411, SEQ ID NO: 412 and SEQ ID NO: 413, SEQ ID NO: 414 and SEQ ID NO: 415, SEQ ID NO: 416 and SEQ ID NO: 417, SEQ ID NO: 418 and SEQ ID NO: 419, SEQ ID NO: 420 and SEQ ID NO: 421, SEQ ID NO: 422 and SEQ ID NO: 423, SEQ ID NO: 424 and SEQ ID NO: 425, SEQ ID NO: 426 and SEQ ID NO: 427, SEQ ID NO: 428 and SEQ ID NO: 429, SEQ ID NO: 430 and SEQ ID NO: 431, SEQ ID NO: 432 and SEQ ID NO: 433, SEQ ID NO: 434 and SEQ ID NO: 435, SEQ ID NO: 436 and SEQ ID NO: 437, SEQ ID NO: 438 and SEQ ID NO: 439, SEQ ID NO: 440 and SEQ ID NO: 441, SEQ ID NO: 442 and SEQ ID NO: 443, SEQ ID NO: 444 and SEQ ID NO: 445, SEQ ID NO: 446 and SEQ ID NO: 447, SEQ ID NO: 448 and SEQ ID NO: 449, SEQ ID NO: 450 and SEQ ID NO: 451, SEQ ID NO: 452 and SEQ ID NO: 453, SEQ ID NO: 454 and SEQ ID NO: 455, SEQ ID NO: 456 and SEQ ID NO: 457, SEQ ID NO: 458 and SEQ ID NO: 459, SEQ ID NO: 460 and SEQ ID NO: 461, SEQ ID NO: 462 and SEQ ID NO: 463, SEQ ID NO: 464 and SEQ ID NO: 465, SEQ ID NO: 466 and SEQ ID NO: 467, SEQ ID NO: 468 and SEQ ID NO: 469, SEQ ID NO: 470 and SEQ ID NO: 471, SEQ ID NO: 472 and SEQ ID NO: 473, SEQ ID NO: 474 and SEQ ID NO: 475, SEQ ID NO: 476 and SEQ ID NO: 477, SEQ ID NO: 478 and SEQ ID NO: 479, SEQ ID NO: 480 and SEQ ID NO: 481, SEQ ID NO: 482 and SEQ ID NO: 483, SEQ ID NO: 484 and SEQ ID NO: 485, SEQ ID NO: 486 and SEQ ID NO: 487, SEQ ID NO: 488 and SEQ ID NO: 489, SEQ ID NO: 490 and SEQ ID NO: 491, SEQ ID NO: 492 and SEQ ID NO: 493, SEQ ID NO: 494 and SEQ ID NO: 495, SEQ ID NO: 496 and SEQ ID NO: 497, SEQ ID NO: 498 and SEQ ID NO: 499, SEQ ID NO: 500 and SEQ ID NO: 501, SEQ ID NO: 502 and SEQ ID NO: 503, SEQ ID NO: 504 and SEQ ID NO: 505, SEQ ID NO: 506 and SEQ ID NO: 507, SEQ ID NO: 508 and SEQ ID NO: 509, SEQ ID NO: 628 and SEQ ID NO: 629, SEQ ID NO: 632 and SEQ ID NO: 633, SEQ ID NO: 634 and SEQ ID NO: 635, SEQ ID NO: 636 and SEQ ID NO: 637, SEQ ID NO: 638 and SEQ ID NO: 639, SEQ ID NO: 640 and SEQ ID NO: 641, SEQ ID NO: 642 and SEQ ID NO: 643, SEQ ID NO: 644 and SEQ ID NO: 645, SEQ ID NO: 646 and SEQ ID NO: 647, SEQ ID NO: 648 and SEQ ID NO: 649, SEQ ID NO: 650 and SEQ ID NO: 651, or SEQ ID NO: 652 and SEQ ID NO: 653, respectively with zero, one, or two single amino acid substitutions in one or more of the HCDRs or LCDRs, wherein the bivalent reference IgG antibody comprising two of the binding domains that specifically bind to the human coronavirus can neutralize SARS-CoV-2.

[0177] In certain embodiments, the three to twelve identical binding domains of the multimeric binding molecule that bind to SARS-CoV, comprise a heavy chain variable region (VH) and a light chain variable region (VL), where the VH and VL comprise six immunoglobulin complementarity determining regions HCDR1, HCDR2, HCDR3, LCDR1, LCDR2, and LCDR3, where the HCDR1, HCDR2, HCDR3, LCDR1, LCDR2, and LCDR3 comprise the CDRs of an antibody comprising the VH and VL of any of SEQ ID NO: 84 and SEQ ID NO: 85, SEQ ID NO: 118 and SEQ ID NO: 119, SEQ ID NO: 120 and SEQ ID NO: 121, SEQ ID NO: 138 and SEQ ID NO: 139, SEQ ID NO: 162 and SEQ ID NO: 163, SEQ ID NO: 222 and SEQ ID NO: 223, SEQ ID NO: 236 and SEQ ID NO: 237, SEQ ID NO: 252 and SEQ ID NO: 253, SEQ ID NO: 260 and SEQ ID NO: 261, SEQ ID NO: 262 and SEQ ID NO: 263, SEQ ID NO: 296 and SEQ ID NO: 297, SEQ ID NO: 384 and SEQ ID NO: 385, SEQ ID NO: 628 and SEQ ID NO: 629, SEQ ID NO: 632 and SEQ ID NO: 633, SEQ ID NO: 634 and SEQ ID NO: 635, SEQ ID NO: 636 and SEQ ID NO: 637, SEQ ID NO: 638 and SEQ ID NO: 639, SEQ ID NO: 640 and SEQ ID NO: 641, SEQ ID NO: 642 and SEQ ID NO: 643, SEQ ID NO: 644 and SEQ ID NO: 645, or SEQ ID NO: 646 and SEQ ID NO: 647, respectively with zero, one, or two single amino acid substitutions in one or more of the HCDRs or LCDRs.

[0178] In certain embodiments, the three to twelve identical binding domains of the multimeric binding molecule that specifically bind to a human coronavirus, e.g., SARS-CoV, comprise a heavy chain variable region (VH) and a light chain variable region (VL), where the VH and VL comprise six immunoglobulin complementarity determining regions HCDR1, HCDR2, HCDR3, LCDR1, LCDR2, and LCDR3, where the HCDR1, HCDR2, HCDR3, LCDR1, LCDR2, and LCDR3 comprise the CDRs of an antibody comprising the VH and VL of SEQ ID NO: 84 and SEQ ID NO: 85, SEQ ID NO: 260 and SEQ ID NO: 261, SEQ ID NO: 262 and SEQ ID NO: 263, SEQ ID NO: 296 and SEQ ID NO: 297, SEQ ID NO: 384 and SEQ ID NO: 385, SEQ ID NO: 628 and SEQ ID NO: 629, SEQ ID NO: 632 and SEQ ID NO: 633, SEQ ID NO: 634 and SEQ ID NO: 635, SEQ ID NO: 636 and SEQ ID NO: 637, SEQ ID NO: 638 and SEQ ID NO: 639, SEQ ID NO: 640 and SEQ ID NO: 641, SEQ ID NO: 642 and SEQ ID NO: 643, SEQ ID NO: 644 and SEQ ID NO: 645, or SEQ ID NO: 646 and SEQ ID NO: 647, respectively with zero, one, or two single amino acid substitutions in one or more of the HCDRs or LCDRs, wherein the bivalent reference IgG antibody comprising two of the binding domains that specifically bind to the human coronavirus can neutralize SARS-CoV.

[0179] In certain embodiments, the three to twelve identical binding domains of the multimeric binding molecule that bind to MERS-CoV, comprise a heavy chain variable region (VH) and a light chain variable region (VL), where the VH and VL comprise six immunoglobulin complementarity determining regions HCDR1, HCDR2, HCDR3, LCDR1, LCDR2, and LCDR3, where the HCDR1, HCDR2, HCDR3, LCDR1, LCDR2, and LCDR3 comprise the CDRs of an antibody comprising the VH and VL of any of SEQ ID NO: 510 and SEQ ID NO: 511, SEQ ID NO: 512 and SEQ ID NO: 513, SEQ ID NO: 514 and SEQ ID NO: 515, SEQ ID NO: 516 and SEQ ID NO: 517, SEQ ID NO: 518 and SEQ ID NO: 519, SEQ ID NO: 520 and SEQ ID NO: 521, SEQ ID NO: 522 and SEQ ID NO: 523, SEQ ID NO: 524 and SEQ ID NO: 525, SEQ ID NO: 526 and SEQ ID NO: 527, SEQ ID NO: 528 and SEQ ID NO: 529, SEQ ID NO: 530 and SEQ ID NO: 531, SEQ ID NO: 532 and SEQ ID NO: 533, SEQ ID NO: 534 and SEQ ID NO: 535, SEQ ID NO: 536 and SEQ ID NO: 537, SEQ ID NO: 538 and SEQ ID NO: 539, SEQ ID NO: 540 and SEQ ID NO: 541, SEQ ID NO: 542 and SEQ ID NO: 543, SEQ ID NO: 544 and SEQ ID NO: 545, SEQ ID NO: 546 and SEQ ID NO: 547, SEQ ID NO: 548 and SEQ ID NO: 549, SEQ ID NO: 550 and SEQ ID NO: 551, SEQ ID NO: 552 and SEQ ID NO: 553, SEQ ID NO: 554 and SEQ ID NO: 555, SEQ ID NO: 556 and SEQ ID NO: 557, SEQ ID NO: 558 and SEQ ID NO: 559, SEQ ID NO: 560 and SEQ ID NO: 561, SEQ ID NO: 562 and SEQ ID NO: 563, SEQ ID NO: 564 and SEQ ID NO: 565, SEQ ID NO: 566 and SEQ ID NO: 567, SEQ ID NO: 568 and SEQ ID NO: 569, SEQ ID NO: 570 and SEQ ID NO: 571, SEQ ID NO: 572 and SEQ ID NO: 573, SEQ ID NO: 574 and SEQ ID NO: 575, SEQ ID NO: 576 and SEQ ID NO: 577, SEQ ID NO: 578 and SEQ ID NO: 579, SEQ ID NO: 580 and SEQ ID NO: 581, SEQ ID NO: 582 and SEQ ID NO: 583, SEQ ID NO: 584 and SEQ ID NO: 585, SEQ ID NO: 586 and SEQ ID NO: 587, SEQ ID NO: 588 and SEQ ID NO: 589, SEQ ID NO: 590 and SEQ ID NO: 591, SEQ ID NO: 592 and SEQ ID NO: 593, SEQ ID NO: 594 and SEQ ID NO: 595, SEQ ID NO: 596 and SEQ ID NO: 597, SEQ ID NO: 598 and SEQ ID NO: 599, SEQ ID NO: 600 and SEQ ID NO: 601, SEQ ID NO: 602 and SEQ ID NO: 603, SEQ ID NO: 604 and SEQ ID NO: 605, SEQ ID NO: 606 and SEQ ID NO: 607, SEQ ID NO: 608 and SEQ ID NO: 609, SEQ ID NO: 610 and SEQ ID NO: 611, SEQ ID NO: 612 and SEQ ID NO: 613, SEQ ID NO: 614 and SEQ ID NO: 615, SEQ ID NO: 616 and SEQ ID NO: 617, SEQ ID NO: 618 and SEQ ID NO: 619, SEQ ID NO: 620 and SEQ ID NO: 621, SEQ ID NO: 622 and SEQ ID NO: 623, SEQ ID NO: 624 and SEQ ID NO: 625, SEQ ID NO: 626 and SEQ ID NO: 627, or SEQ ID NO: 630 and SEQ ID NO: 631, respectively with zero, one, or two single amino acid substitutions in one or more of the HCDRs or LCDRs.

[0180] In certain embodiments, the three to twelve identical binding domains of the multimeric binding molecule that specifically bind to a human coronavirus, e.g., MERS-CoV, comprise a heavy chain variable region (VH) and a light chain variable region (VL), where the VH and VL comprise six immunoglobulin complementarity determining regions HCDR1, HCDR2, HCDR3, LCDR1, LCDR2, and LCDR3, where the HCDR1, HCDR2, HCDR3, LCDR1, LCDR2, and LCDR3 comprise the CDRs of an antibody comprising the VH and VL of SEQ ID NO: 510 and SEQ ID NO: 511, SEQ ID NO: 512 and SEQ ID NO: 513, SEQ ID NO: 514 and SEQ ID NO: 515, SEQ ID NO: 516 and SEQ ID NO: 517, SEQ ID NO: 518 and SEQ ID NO: 519, SEQ ID NO: 520 and SEQ ID NO: 521, SEQ ID NO: 522 and SEQ ID NO: 523, SEQ ID NO: 524 and SEQ ID NO: 525, SEQ ID NO: 526 and SEQ ID NO: 527, SEQ ID NO: 528 and SEQ ID NO: 529, SEQ ID NO: 530 and SEQ ID NO: 531, SEQ ID NO: 532 and SEQ ID NO: 533, SEQ ID NO: 534 and SEQ ID NO: 535, SEQ ID NO: 536 and SEQ ID NO: 537, SEQ ID NO: 538 and SEQ ID NO: 539, SEQ ID NO: 540 and SEQ ID NO: 541, SEQ ID NO: 542 and SEQ ID NO: 543, SEQ ID NO: 544 and SEQ ID NO: 545, SEQ ID NO: 546 and SEQ ID NO: 547, SEQ ID NO: 548 and SEQ ID NO: 549, SEQ ID NO: 550 and SEQ ID NO: 551, SEQ ID NO: 552 and SEQ ID NO: 553, SEQ ID NO: 554 and SEQ ID NO: 555, SEQ ID NO: 556 and SEQ ID NO: 557, SEQ ID NO: 558 and SEQ ID NO: 559, SEQ ID NO: 560 and SEQ ID NO: 561, SEQ ID NO: 562 and SEQ ID NO: 563, SEQ ID NO: 564 and SEQ ID NO: 565, SEQ ID NO: 566 and SEQ ID NO: 567, SEQ ID NO: 568 and SEQ ID NO: 569, SEQ ID NO: 574 and SEQ ID NO: 575, SEQ ID NO: 576 and SEQ ID NO: 577, SEQ ID NO: 578 and SEQ ID NO: 579, SEQ ID NO: 580 and SEQ ID NO: 581, SEQ ID NO: 582 and SEQ ID NO: 583, SEQ ID NO: 584 and SEQ ID NO: 585, SEQ ID NO: 586 and SEQ ID NO: 587, SEQ ID NO: 588 and SEQ ID NO: 589, SEQ ID NO: 590 and SEQ ID NO: 591, SEQ ID NO: 592 and SEQ ID NO: 593, SEQ ID NO: 594 and SEQ ID NO: 595, SEQ ID NO: 596 and SEQ ID NO: 597, SEQ ID NO: 598 and SEQ ID NO: 599, SEQ ID NO: 600 and SEQ ID NO: 601, SEQ ID NO: 602 and SEQ ID NO: 603, SEQ ID NO: 604 and SEQ ID NO: 605, SEQ ID NO: 606 and SEQ ID NO: 607, SEQ ID NO: 608 and SEQ ID NO: 609, SEQ ID NO: 610 and SEQ ID NO: 611, SEQ ID NO: 612 and SEQ ID NO: 613, SEQ ID NO: 614 and SEQ ID NO: 615, SEQ ID NO: 616 and SEQ ID NO: 617, SEQ ID NO: 618 and SEQ ID NO: 619, SEQ ID NO: 620 and SEQ ID NO: 621, SEQ ID NO: 622 and SEQ ID NO: 623, SEQ ID NO: 624 and SEQ ID NO: 625, SEQ ID NO: 626 and SEQ ID NO: 627, or SEQ ID NO: 630 and SEQ ID NO: 631, respectively with zero, one, or two single amino acid substitutions in one or more of the HCDRs or LCDRs, wherein the bivalent reference IgG antibody comprising two of the binding domains that specifically bind to the human coronavirus can neutralize MERS-CoV.

[0181] In certain embodiments, the three to twelve identical binding domains of the multimeric binding molecule that specifically bind to a human coronavirus, e.g., SARS-CoV or SARS-CoV-2, comprise a heavy chain variable region (VH) and a light chain variable region (VL), where the VH and VL comprise six immunoglobulin complementarity determining regions HCDR1, HCDR2, HCDR3, LCDR1, LCDR2, and LCDR3, where the HCDR1, HCDR2, HCDR3, LCDR1, LCDR2, and LCDR3 comprise the CDRs of an antibody comprising the VH and VL of SEQ ID NO: 118 and SEQ ID NO: 119, SEQ ID NO: 162 and SEQ ID NO: 163, SEQ ID NO: 222 and SEQ ID NO: 223, SEQ ID NO: 260 and SEQ ID NO: 261, SEQ ID NO: 296 and SEQ ID NO: 297, SEQ ID NO: 384 and SEQ ID NO: 385, SEQ ID NO: 628 and SEQ ID NO: 629, SEQ ID NO: 632 and SEQ ID NO: 633, SEQ ID NO: 634 and SEQ ID NO: 635, SEQ ID NO: 636 and SEQ ID NO: 637, SEQ ID NO: 638 and SEQ ID NO: 639, SEQ ID NO: 640 and SEQ ID NO: 641, SEQ ID NO: 642 and SEQ ID NO: 643, SEQ ID NO: 644 and SEQ ID NO: 645, or SEQ ID NO: 646 and SEQ ID NO: 647, respectively with zero, one, or two single amino acid substitutions in one or more of the HCDRs or LCDRs, wherein the bivalent reference IgG antibody comprising two of the binding domains that specifically bind to the human coronavirus can neutralize SARS-CoV-2 and can bind SARS-CoV.

[0182] In certain embodiments, the three to twelve identical binding domains of the multimeric binding molecule that specifically bind to at least two human coronaviruses, e.g., SARS-CoV and SARS-CoV-2, comprise a heavy chain variable region (VH) and a light chain variable region (VL), where the VH and VL comprise six immunoglobulin complementarity determining regions HCDR1, HCDR2, HCDR3, LCDR1, LCDR2, and LCDR3, where the HCDR1, HCDR2, HCDR3, LCDR1, LCDR2, and LCDR3 comprise the CDRs of an antibody comprising the VH and VL of SEQ ID NO: 260 and SEQ ID NO: 261, SEQ ID NO: 296 and SEQ ID NO: 297, SEQ ID NO: 384 and SEQ ID NO: 385, SEQ ID NO: 628 and SEQ ID NO: 629, SEQ ID NO: 632 and SEQ ID NO: 633, SEQ ID NO: 634 and SEQ ID NO: 635, SEQ ID NO: 636 and SEQ ID NO: 637, SEQ ID NO: 638 and SEQ ID NO: 639, SEQ ID NO: 640 and SEQ ID NO: 641, SEQ ID NO: 642 and SEQ ID NO: 643, SEQ ID NO: 644 and SEQ ID NO: 645, or SEQ ID NO: 646 and SEQ ID NO: 647, respectively with zero, one, or two single amino acid substitutions in one or more of the HCDRs or LCDRs, wherein the bivalent reference IgG antibody comprising two of the binding domains that specifically bind to the human coronavirus can neutralize SARS-CoV and SARS-CoV-2.

[0183] In certain embodiments, the three to twelve identical binding domains of the multimeric binding molecule that specifically bind to a human coronavirus, e.g., SARS-CoV-2, comprise an antibody VH and a VL, wherein the VH and VL comprise amino acid sequences at least 80%, at least 85%, at least 90%, at least 95% or 100% identical to SEQ ID NO: 84 and SEQ ID NO: 85, SEQ ID NO: 86 and SEQ ID NO: 87, SEQ ID NO: 88 and SEQ ID NO: 89, SEQ ID NO: 90 and SEQ ID NO: 91, SEQ ID NO: 92 and SEQ ID NO: 93, SEQ ID NO: 94 and SEQ ID NO: 95, SEQ ID NO: 96 and SEQ ID NO: 97, SEQ ID NO: 98 and SEQ ID NO: 99, SEQ ID NO: 100 and SEQ ID NO: 101, SEQ ID NO: 102 and SEQ ID NO: 103, SEQ ID NO: 104 and SEQ ID NO: 105, SEQ ID NO: 106 and SEQ ID NO: 107, SEQ ID NO: 108 and SEQ ID NO: 109, SEQ ID NO: 110 and SEQ ID NO: 111, SEQ ID NO: 112 and SEQ ID NO: 113, SEQ ID NO: 114 and SEQ ID NO: 115, SEQ ID NO: 116 and SEQ ID NO: 117, SEQ ID NO: 118 and SEQ ID NO: 119, SEQ ID NO: 120 and SEQ ID NO: 121, SEQ ID NO: 122 and SEQ ID NO: 123, SEQ ID NO: 124 and SEQ ID NO: 125, SEQ ID NO: 126 and SEQ ID NO: 127, SEQ ID NO: 128 and SEQ ID NO: 129, SEQ ID NO: 130 and SEQ ID NO: 131, SEQ ID NO: 132 and SEQ ID NO: 133, SEQ ID NO: 134 and SEQ ID NO: 135, SEQ ID NO: 136 and SEQ ID NO: 137, SEQ ID NO: 138 and SEQ ID NO: 139, SEQ ID NO: 140 and SEQ ID NO: 141, SEQ ID NO: 142 and SEQ ID NO: 143, SEQ ID NO: 144 and SEQ ID NO: 145, SEQ ID NO: 146 and SEQ ID NO: 147, SEQ ID NO: 148 and SEQ ID NO: 149, SEQ ID NO: 150 and SEQ ID NO: 151, SEQ ID NO: 152 and SEQ ID NO: 153, SEQ ID NO: 154 and SEQ ID NO: 155, SEQ ID NO: 156 and SEQ ID NO: 157, SEQ ID NO: 158 and SEQ ID NO: 159, SEQ ID NO: 160 and SEQ ID NO: 161, SEQ ID NO: 162 and SEQ ID NO: 163, SEQ ID NO: 164 and SEQ ID NO: 165, SEQ ID NO: 166 and SEQ ID NO: 167, SEQ ID NO: 168 and SEQ ID NO: 169, SEQ ID NO: 170 and SEQ ID NO: 171, SEQ ID NO: 172 and SEQ ID NO: 173, SEQ ID NO: 174 and SEQ ID NO: 175, SEQ ID NO: 176 and SEQ ID NO: 177, SEQ ID NO: 178 and SEQ ID NO: 179, SEQ ID NO: 180 and SEQ ID NO: 181, SEQ ID NO: 182 and SEQ ID NO: 183, SEQ ID NO: 184 and SEQ ID NO: 185, SEQ ID NO: 186 and SEQ ID NO: 187, SEQ ID NO: 188 and SEQ ID NO: 189, SEQ ID NO: 190 and SEQ ID NO: 191, SEQ ID NO: 192 and SEQ ID NO: 193, SEQ ID NO: 194 and SEQ ID NO: 195, SEQ ID NO: 196 and SEQ ID NO: 197, SEQ ID NO: 198 and SEQ ID NO: 199, SEQ ID NO: 200 and SEQ ID NO: 201, SEQ ID NO: 202 and SEQ ID NO: 203, SEQ ID NO: 204 and SEQ ID NO: 205, SEQ ID NO: 206 and SEQ ID NO: 207, SEQ ID NO: 208 and SEQ ID NO: 209, SEQ ID NO: 210 and SEQ ID NO: 211, SEQ ID NO: 212 and SEQ ID NO: 213, SEQ ID NO: 214 and SEQ ID NO: 215, SEQ ID NO: 216 and SEQ ID NO: 217, SEQ ID NO: 218 and SEQ ID NO: 219, SEQ ID NO: 220 and SEQ ID NO: 221, SEQ ID NO: 222 and SEQ ID NO: 223, SEQ ID NO: 224 and SEQ ID NO: 225, SEQ ID NO: 226 and SEQ ID NO: 227, SEQ ID NO: 228 and SEQ ID NO: 229, SEQ ID NO: 230 and SEQ ID NO: 231, SEQ ID NO: 232 and SEQ ID NO: 233, SEQ ID NO: 234 and SEQ ID NO: 235, SEQ ID NO: 236 and SEQ ID NO: 237, SEQ ID NO: 238 and SEQ ID NO: 239, SEQ ID NO: 240 and SEQ ID NO: 241, SEQ ID NO: 242 and SEQ ID NO: 243, SEQ ID NO: 244 and SEQ ID NO: 245, SEQ ID NO: 246 and SEQ ID NO: 247, SEQ ID NO: 248 and SEQ ID NO: 249, SEQ ID NO: 250 and SEQ ID NO: 251, SEQ ID NO: 252 and SEQ ID NO: 253, SEQ ID NO: 254 and SEQ ID NO: 255, SEQ ID NO: 256 and SEQ ID NO: 257, SEQ ID NO: 258 and SEQ ID NO: 259, SEQ ID NO: 260 and SEQ ID NO: 261, SEQ ID NO: 264 and SEQ ID NO: 265, SEQ ID NO: 266 and SEQ ID NO: 267, SEQ ID NO: 268 and SEQ ID NO: 269, SEQ ID NO: 270 and SEQ ID NO: 271, SEQ ID NO: 272 and SEQ ID NO: 273, SEQ ID NO: 274 and SEQ ID NO: 275, SEQ ID NO: 276 and SEQ ID NO: 277, SEQ ID NO: 278 and SEQ ID NO: 279, SEQ ID NO: 280 and SEQ ID NO: 281, SEQ ID NO: 282 and SEQ ID NO: 283, SEQ ID NO: 284 and SEQ ID NO: 285, SEQ ID NO: 286 and SEQ ID NO: 287, SEQ ID NO: 288 and SEQ ID NO: 289, SEQ ID NO: 290 and SEQ ID NO: 291, SEQ ID NO: 292 and SEQ ID NO: 293, SEQ ID NO: 294 and SEQ ID NO: 295, SEQ ID NO: 296 and SEQ ID NO: 297, SEQ ID NO: 298 and SEQ ID NO: 299, SEQ ID NO: 300 and SEQ ID NO: 301, SEQ ID NO: 302 and SEQ ID NO: 303, SEQ ID NO: 304 and SEQ ID NO: 305, SEQ ID NO: 306 and SEQ ID NO: 307, SEQ ID NO: 308 and SEQ ID NO: 309, SEQ ID NO: 310 and SEQ ID NO: 311, SEQ ID NO: 312 and SEQ ID NO: 313, SEQ ID NO: 314 and SEQ ID NO: 315, SEQ ID NO: 316 and SEQ ID NO: 317, SEQ ID NO: 318 and SEQ ID NO: 319, SEQ ID NO: 320 and SEQ ID NO: 321, SEQ ID NO: 322 and SEQ ID NO: 323, SEQ ID NO: 324 and SEQ ID NO: 325, SEQ ID NO: 326 and SEQ ID NO: 327, SEQ ID NO: 328 and SEQ ID NO: 329, SEQ ID NO: 330 and SEQ ID NO: 331, SEQ ID NO: 332 and SEQ ID NO: 333, SEQ ID NO: 336 and SEQ ID NO: 337, SEQ ID NO: 338 and SEQ ID NO: 339, SEQ ID NO: 340 and SEQ ID NO: 341, SEQ ID NO: 342 and SEQ ID NO: 343, SEQ ID NO: 344 and SEQ ID NO: 345, SEQ ID NO: 348 and SEQ ID NO: 349, SEQ ID NO: 350 and SEQ ID NO: 351, SEQ ID NO: 352 and SEQ ID NO: 353, SEQ ID NO: 354 and SEQ ID NO: 355, SEQ ID NO: 356 and SEQ ID NO: 357, SEQ ID NO: 358 and SEQ ID NO: 359, SEQ ID NO: 362 and SEQ ID NO: 363, SEQ ID NO: 364 and SEQ ID NO: 365, SEQ ID NO: 366 and SEQ ID NO: 367, SEQ ID NO: 368 and SEQ ID NO: 369, SEQ ID NO: 370 and SEQ ID NO: 371, SEQ ID NO: 372 and SEQ ID NO: 373, SEQ ID NO: 374 and SEQ ID NO: 375, SEQ ID NO: 376 and SEQ ID NO: 377, SEQ ID NO: 378 and SEQ ID NO: 379, SEQ ID NO: 380 and SEQ ID NO: 381, SEQ ID NO: 382 and SEQ ID NO: 383, SEQ ID NO: 384 and SEQ ID NO: 385, SEQ ID NO: 386 and SEQ ID NO: 387, SEQ ID NO: 388 and SEQ ID NO: 389, SEQ ID NO: 390 and SEQ ID NO: 391, SEQ ID NO: 392 and SEQ ID NO: 393, SEQ ID NO: 394 and SEQ ID NO: 395, SEQ ID NO: 396 and SEQ ID NO: 397, SEQ ID NO: 398 and SEQ ID NO: 399, SEQ ID NO: 400 and SEQ ID NO: 401, SEQ ID NO: 402 and SEQ ID NO: 403, SEQ ID NO: 404 and SEQ ID NO: 405, SEQ ID NO: 406 and SEQ ID NO: 407, SEQ ID NO: 408 and SEQ ID NO: 409, SEQ ID NO: 410 and SEQ ID NO: 411, SEQ ID NO: 412 and SEQ ID NO: 413, SEQ ID NO: 414 and SEQ ID NO: 415, SEQ ID NO: 416 and SEQ ID NO: 417, SEQ ID NO: 418 and SEQ ID NO: 419, SEQ ID NO: 420 and SEQ ID NO: 421, SEQ ID NO: 422 and SEQ ID NO: 423, SEQ ID NO: 424 and SEQ ID NO: 425, SEQ ID NO: 426 and SEQ ID NO: 427, SEQ ID NO: 428 and SEQ ID NO: 429, SEQ ID NO: 430 and SEQ ID NO: 431, SEQ ID NO: 432 and SEQ ID NO: 433, SEQ ID NO: 434 and SEQ ID NO: 435, SEQ ID NO: 436 and SEQ ID NO: 437, SEQ ID NO: 438 and SEQ ID NO: 439, SEQ ID NO: 440 and SEQ ID NO: 441, SEQ ID NO: 442 and SEQ ID NO: 443, SEQ ID NO: 444 and SEQ ID NO: 445, SEQ ID NO: 446 and SEQ ID NO: 447, SEQ ID NO: 448 and SEQ ID NO: 449, SEQ ID NO: 450 and SEQ ID NO: 451, SEQ ID NO: 452 and SEQ ID NO: 453, SEQ ID NO: 454 and SEQ ID NO: 455, SEQ ID NO: 456 and SEQ ID NO: 457, SEQ ID NO: 458 and SEQ ID NO: 459, SEQ ID NO: 460 and SEQ ID NO: 461, SEQ ID NO: 462 and SEQ ID NO: 463, SEQ ID NO: 464 and SEQ ID NO: 465, SEQ ID NO: 466 and SEQ ID NO: 467, SEQ ID NO: 468 and SEQ ID NO: 469, SEQ ID NO: 470 and SEQ ID NO: 471, SEQ ID NO: 472 and SEQ ID NO: 473, SEQ ID NO: 474 and SEQ ID NO: 475, SEQ ID NO: 476 and SEQ ID NO: 477, SEQ ID NO: 478 and SEQ ID NO: 479, SEQ ID NO: 480 and SEQ ID NO: 481, SEQ ID NO: 482 and SEQ ID NO: 483, SEQ ID NO: 484 and SEQ ID NO: 485, SEQ ID NO: 486 and SEQ ID NO: 487, SEQ ID NO: 488 and SEQ ID NO: 489, SEQ ID NO: 490 and SEQ ID NO: 491, SEQ ID NO: 492 and SEQ ID NO: 493, SEQ ID NO: 494 and SEQ ID NO: 495, SEQ ID NO: 496 and SEQ ID NO: 497, SEQ ID NO: 498 and SEQ ID NO: 499, SEQ ID NO: 500 and SEQ ID NO: 501, SEQ ID NO: 502 and SEQ ID NO: 503, SEQ ID NO: 504 and SEQ ID NO: 505, SEQ ID NO: 506 and SEQ ID NO: 507, SEQ ID NO: 508 and SEQ ID NO: 509, SEQ ID NO: 628 and SEQ ID NO: 629, SEQ ID NO: 630 and SEQ ID NO: 631, SEQ ID NO: 632 and SEQ ID NO: 633, SEQ ID NO: 634 and SEQ ID NO: 635, SEQ ID NO: 636 and SEQ ID NO: 637, SEQ ID NO: 638 and SEQ ID NO: 639, SEQ ID NO: 640 and SEQ ID NO: 641, SEQ ID NO: 642 and SEQ ID NO: 643, SEQ ID NO: 644 and SEQ ID NO: 645, SEQ ID NO: 646 and SEQ ID NO: 647, SEQ ID NO: 648 and SEQ ID NO: 649, SEQ ID NO: 650 and SEQ ID NO: 651, or SEQ ID NO: 652 and SEQ ID NO: 653, respectively.

[0184] In certain embodiments, the three to twelve identical binding domains of the multimeric binding molecule that specifically bind to a human coronavirus, e.g., SARS-CoV-2, comprise an antibody VH and a VL, where the VH and VL comprise amino acid sequences at least 80%, at least 85%, at least 90%, at least 95% or 100% identical to SEQ ID NO: 86 and SEQ ID NO: 87, SEQ ID NO: 88 and SEQ ID NO: 89, SEQ ID NO: 90 and SEQ ID NO: 91, SEQ ID NO: 92 and SEQ ID NO: 93, SEQ ID NO: 94 and SEQ ID NO: 95, SEQ ID NO: 96 and SEQ ID NO: 97, SEQ ID NO: 98 and SEQ ID NO: 99, SEQ ID NO: 100 and SEQ ID NO: 101, SEQ ID NO: 102 and SEQ ID NO: 103, SEQ ID NO: 106 and SEQ ID NO: 107, SEQ ID NO: 110 and SEQ ID NO: 111, SEQ ID NO: 118 and SEQ ID NO: 119, SEQ ID NO: 128 and SEQ ID NO: 129, SEQ ID NO: 130 and SEQ ID NO: 131, SEQ ID NO: 132 and SEQ ID NO: 133, SEQ ID NO: 134 and SEQ ID NO: 135, SEQ ID NO: 136 and SEQ ID NO: 137, SEQ ID NO: 142 and SEQ ID NO: 143, SEQ ID NO: 146 and SEQ ID NO: 147, SEQ ID NO: 150 and SEQ ID NO: 151, SEQ ID NO: 156 and SEQ ID NO: 157, SEQ ID NO: 160 and SEQ ID NO: 161, SEQ ID NO: 162 and SEQ ID NO: 163, SEQ ID NO: 164 and SEQ ID NO: 165, SEQ ID NO: 166 and SEQ ID NO: 167, SEQ ID NO: 168 and SEQ ID NO: 169, SEQ ID NO: 170 and SEQ ID NO: 171, SEQ ID NO: 172 and SEQ ID NO: 173, SEQ ID NO: 174 and SEQ ID NO: 175, SEQ ID NO: 176 and SEQ ID NO: 177, SEQ ID NO: 180 and SEQ ID NO: 181, SEQ ID NO: 182 and SEQ ID NO: 183, SEQ ID NO: 186 and SEQ ID NO: 187, SEQ ID NO: 188 and SEQ ID NO: 189, SEQ ID NO: 194 and SEQ ID NO: 195, SEQ ID NO: 200 and SEQ ID NO: 201, SEQ ID NO: 206 and SEQ ID NO: 207, SEQ ID NO: 208 and SEQ ID NO: 209, SEQ ID NO: 218 and SEQ ID NO: 219, SEQ ID NO: 220 and SEQ ID NO: 221, SEQ ID NO: 222 and SEQ ID NO: 223, SEQ ID NO: 224 and SEQ ID NO: 225, SEQ ID NO: 228 and SEQ ID NO: 229, SEQ ID NO: 230 and SEQ ID NO: 231, SEQ ID NO: 240 and SEQ ID NO: 241, SEQ ID NO: 244 and SEQ ID NO: 245, SEQ ID NO: 246 and SEQ ID NO: 247, SEQ ID NO: 256 and SEQ ID NO: 257, SEQ ID NO: 258 and SEQ ID NO: 259, SEQ ID NO: 260 and SEQ ID NO: 261, SEQ ID NO: 264 and SEQ ID NO: 265, SEQ ID NO: 266 and SEQ ID NO: 267, SEQ ID NO: 268 and SEQ ID NO: 269, SEQ ID NO: 270 and SEQ ID NO: 271, SEQ ID NO: 272 and SEQ ID NO: 273, SEQ ID NO: 274 and SEQ ID NO: 275, SEQ ID NO: 276 and SEQ ID NO: 277, SEQ ID NO: 278 and SEQ ID NO: 279, SEQ ID NO: 280 and SEQ ID NO: 281, SEQ ID NO: 282 and SEQ ID NO: 283, SEQ ID NO: 284 and SEQ ID NO: 285, SEQ ID NO: 286 and SEQ ID NO: 287, SEQ ID NO: 288 and SEQ ID NO: 289, SEQ ID NO: 290 and SEQ ID NO: 291, SEQ ID NO: 292 and SEQ ID NO: 293, SEQ ID NO: 294 and SEQ ID NO: 295, SEQ ID NO: 296 and SEQ ID NO: 297, SEQ ID NO: 298 and SEQ ID NO: 299, SEQ ID NO: 300 and SEQ ID NO: 301, SEQ ID NO: 302 and SEQ ID NO: 303, SEQ ID NO: 304 and SEQ ID NO: 305, SEQ ID NO: 306 and SEQ ID NO: 307, SEQ ID NO: 308 and SEQ ID NO: 309, SEQ ID NO: 310 and SEQ ID NO: 311, SEQ ID NO: 312 and SEQ ID NO: 313, SEQ ID NO: 314 and SEQ ID NO: 315, SEQ ID NO: 316 and SEQ ID NO: 317, SEQ ID NO: 318 and SEQ ID NO: 319, SEQ ID NO: 320 and SEQ ID NO: 321, SEQ ID NO: 322 and SEQ ID NO: 323, SEQ ID NO: 324 and SEQ ID NO: 325, SEQ ID NO: 326 and SEQ ID NO: 327, SEQ ID NO: 328 and SEQ ID NO: 329, SEQ ID NO: 330 and SEQ ID NO: 331, SEQ ID NO: 332 and SEQ ID NO: 333, SEQ ID NO: 336 and SEQ ID NO: 337, SEQ ID NO: 338 and SEQ ID NO: 339, SEQ ID NO: 340 and SEQ ID NO: 341, SEQ ID NO: 342 and SEQ ID NO: 343, SEQ ID NO: 344 and SEQ ID NO: 345, SEQ ID NO: 348 and SEQ ID NO: 349, SEQ ID NO: 350 and SEQ ID NO: 351, SEQ ID NO: 352 and SEQ ID NO: 353, SEQ ID NO: 354 and SEQ ID NO: 355, SEQ ID NO: 356 and SEQ ID NO: 357, SEQ ID NO: 358 and SEQ ID NO: 359, SEQ ID NO: 360 and SEQ ID NO: 361, SEQ ID NO: 362 and SEQ ID NO: 363, SEQ ID NO: 364 and SEQ ID NO: 365, SEQ ID NO: 366 and SEQ ID NO: 367, SEQ ID NO: 368 and SEQ ID NO: 369, SEQ ID NO: 370 and SEQ ID NO: 371, SEQ ID NO: 372 and SEQ ID NO: 373, SEQ ID NO: 374 and SEQ ID NO: 375, SEQ ID NO: 376 and SEQ ID NO: 377, SEQ ID NO: 378 and SEQ ID NO: 379, SEQ ID NO: 380 and SEQ ID NO: 381, SEQ ID NO: 382 and SEQ ID NO: 383, SEQ ID NO: 384 and SEQ ID NO: 385, SEQ ID NO: 386 and SEQ ID NO: 387, SEQ ID NO: 388 and SEQ ID NO: 389, SEQ ID NO: 390 and SEQ ID NO: 391, SEQ ID NO: 392 and SEQ ID NO: 393, SEQ ID NO: 394 and SEQ ID NO: 395, SEQ ID NO: 396 and SEQ ID NO: 397, SEQ ID NO: 398 and SEQ ID NO: 399, SEQ ID NO: 400 and SEQ ID NO: 401, SEQ ID NO: 402 and SEQ ID NO: 403, SEQ ID NO: 404 and SEQ ID NO: 405, SEQ ID NO: 406 and SEQ ID NO: 407, SEQ ID NO: 408 and SEQ ID NO: 409, SEQ ID NO: 410 and SEQ ID NO: 411, SEQ ID NO: 412 and SEQ ID NO: 413, SEQ ID NO: 414 and SEQ ID NO: 415, SEQ ID NO: 416 and SEQ ID NO: 417, SEQ ID NO: 418 and SEQ ID NO: 419, SEQ ID NO: 420 and SEQ ID NO: 421, SEQ ID NO: 422 and SEQ ID NO: 423, SEQ ID NO: 424 and SEQ ID NO: 425, SEQ ID NO: 426 and SEQ ID NO: 427, SEQ ID NO: 428 and SEQ ID NO: 429, SEQ ID NO: 430 and SEQ ID NO: 431, SEQ ID NO: 432 and SEQ ID NO: 433, SEQ ID NO: 434 and SEQ ID NO: 435, SEQ ID NO: 436 and SEQ ID NO: 437, SEQ ID NO: 438 and SEQ ID NO: 439, SEQ ID NO: 440 and SEQ ID NO: 441, SEQ ID NO: 442 and SEQ ID NO: 443, SEQ ID NO: 444 and SEQ ID NO: 445, SEQ ID NO: 446 and SEQ ID NO: 447, SEQ ID NO: 448 and SEQ ID NO: 449, SEQ ID NO: 450 and SEQ ID NO: 451, SEQ ID NO: 452 and SEQ ID NO: 453, SEQ ID NO: 454 and SEQ ID NO: 455, SEQ ID NO: 456 and SEQ ID NO: 457, SEQ ID NO: 458 and SEQ ID NO: 459, SEQ ID NO: 460 and SEQ ID NO: 461, SEQ ID NO: 462 and SEQ ID NO: 463, SEQ ID NO: 464 and SEQ ID NO: 465, SEQ ID NO: 466 and SEQ ID NO: 467, SEQ ID NO: 468 and SEQ ID NO: 469, SEQ ID NO: 470 and SEQ ID NO: 471, SEQ ID NO: 472 and SEQ ID NO: 473, SEQ ID NO: 474 and SEQ ID NO: 475, SEQ ID NO: 476 and SEQ ID NO: 477, SEQ ID NO: 478 and SEQ ID NO: 479, SEQ ID NO: 480 and SEQ ID NO: 481, SEQ ID NO: 482 and SEQ ID NO: 483, SEQ ID NO: 484 and SEQ ID NO: 485, SEQ ID NO: 486 and SEQ ID NO: 487, SEQ ID NO: 488 and SEQ ID NO: 489, SEQ ID NO: 490 and SEQ ID NO: 491, SEQ ID NO: 492 and SEQ ID NO: 493, SEQ ID NO: 494 and SEQ ID NO: 495, SEQ ID NO: 496 and SEQ ID NO: 497, SEQ ID NO: 498 and SEQ ID NO: 499, SEQ ID NO: 500 and SEQ ID NO: 501, SEQ ID NO: 502 and SEQ ID NO: 503, SEQ ID NO: 504 and SEQ ID NO: 505, SEQ ID NO: 506 and SEQ ID NO: 507, SEQ ID NO: 508 and SEQ ID NO: 509, SEQ ID NO: 628 and SEQ ID NO: 629, SEQ ID NO: 632 and SEQ ID NO: 633, SEQ ID NO: 634 and SEQ ID NO: 635, SEQ ID NO: 636 and SEQ ID NO: 637, SEQ ID NO: 638 and SEQ ID NO: 639, SEQ ID NO: 640 and SEQ ID NO: 641, SEQ ID NO: 642 and SEQ ID NO: 643, SEQ ID NO: 644 and SEQ ID NO: 645, SEQ ID NO: 646 and SEQ ID NO: 647, SEQ ID NO: 648 and SEQ ID NO: 649, SEQ ID NO: 650 and SEQ ID NO: 651, or SEQ ID NO: 652 and SEQ ID NO: 653, respectively, wherein the bivalent reference IgG antibody comprising two of the binding domains that specifically bind to the human coronavirus can neutralize SARS-CoV-2.

[0185] In certain embodiments, the three to twelve identical binding domains of the multimeric binding molecule that specifically bind to a human coronavirus, e.g., SARS-CoV, comprise an antibody VH and a VL, where the VH and VL comprise amino acid sequences at least 80%, at least 85%, at least 90%, at least 95% or 100% identical to SEQ ID NO: 84 and SEQ ID NO: 85, SEQ ID NO: 118 and SEQ ID NO: 119, SEQ ID NO: 120 and SEQ ID NO: 121, SEQ ID NO: 138 and SEQ ID NO: 139, SEQ ID NO: 162 and SEQ ID NO: 163, SEQ ID NO: 222 and SEQ ID NO: 223, SEQ ID NO: 236 and SEQ ID NO: 237, SEQ ID NO: 252 and SEQ ID NO: 253, SEQ ID NO: 260 and SEQ ID NO: 261, SEQ ID NO: 262 and SEQ ID NO: 263, SEQ ID NO: 296 and SEQ ID NO: 297, SEQ ID NO: 384 and SEQ ID NO: 385, SEQ ID NO: 628 and SEQ ID NO: 629, SEQ ID NO: 632 and SEQ ID NO: 633, SEQ ID NO: 634 and SEQ ID NO: 635, SEQ ID NO: 636 and SEQ ID NO: 637, SEQ ID NO: 638 and SEQ ID NO: 639, SEQ ID NO: 640 and SEQ ID NO: 641, SEQ ID NO: 642 and SEQ ID NO: 643, SEQ ID NO: 644 and SEQ ID NO: 645, or SEQ ID NO: 646 and SEQ ID NO: 647, respectively.

[0186] In certain embodiments, the three to twelve identical binding domains of the multimeric binding molecule that specifically bind to a human coronavirus, e.g., SARS-CoV, comprise an antibody VH and a VL, where the VH and VL comprise amino acid sequences at least 80%, at least 85%, at least 90%, at least 95% or 100% identical to SEQ ID NO: 84 and SEQ ID NO: 85, SEQ ID NO: 260 and SEQ ID NO: 261, SEQ ID NO: 262 and SEQ ID NO: 263, SEQ ID NO: 296 and SEQ ID NO: 297, SEQ ID NO: 384 and SEQ ID NO: 385, SEQ ID NO: 628 and SEQ ID NO: 629, SEQ ID NO: 632 and SEQ ID NO: 633, SEQ ID NO: 634 and SEQ ID NO: 635, SEQ ID NO: 636 and SEQ ID NO: 637, SEQ ID NO: 638 and SEQ ID NO: 639, SEQ ID NO: 640 and SEQ ID NO: 641, SEQ ID NO: 642 and SEQ ID NO: 643, SEQ ID NO: 644 and SEQ ID NO: 645, or SEQ ID NO: 646 and SEQ ID NO: 647, respectively, wherein the bivalent reference IgG antibody comprising two of the binding domains that specifically bind to the human coronavirus can neutralize SARS-CoV.

[0187] In certain embodiments, the three to twelve identical binding domains of the multimeric binding molecule that specifically bind to a human coronavirus, e.g., MERS-CoV, comprise an antibody VH and a VL, where the VH and VL comprise amino acid sequences at least 80%, at least 85%, at least 90%, at least 95% or 100% identical to SEQ ID NO: 510 and SEQ ID NO: 511, SEQ ID NO: 512 and SEQ ID NO: 513, SEQ ID NO: 514 and SEQ ID NO: 515, SEQ ID NO: 516 and SEQ ID NO: 517, SEQ ID NO: 518 and SEQ ID NO: 519, SEQ ID NO: 520 and SEQ ID NO: 521, SEQ ID NO: 522 and SEQ ID NO: 523, SEQ ID NO: 524 and SEQ ID NO: 525, SEQ ID NO: 526 and SEQ ID NO: 527, SEQ ID NO: 528 and SEQ ID NO: 529, SEQ ID NO: 530 and SEQ ID NO: 531, SEQ ID NO: 532 and SEQ ID NO: 533, SEQ ID NO: 534 and SEQ ID NO: 535, SEQ ID NO: 536 and SEQ ID NO: 537, SEQ ID NO: 538 and SEQ ID NO: 539, SEQ ID NO: 540 and SEQ ID NO: 541, SEQ ID NO: 542 and SEQ ID NO: 543, SEQ ID NO: 544 and SEQ ID NO: 545, SEQ ID NO: 546 and SEQ ID NO: 547, SEQ ID NO: 548 and SEQ ID NO: 549, SEQ ID NO: 550 and SEQ ID NO: 551, SEQ ID NO: 552 and SEQ ID NO: 553, SEQ ID NO: 554 and SEQ ID NO: 555, SEQ ID NO: 556 and SEQ ID NO: 557, SEQ ID NO: 558 and SEQ ID NO: 559, SEQ ID NO: 560 and SEQ ID NO: 561, SEQ ID NO: 562 and SEQ ID NO: 563, SEQ ID NO: 564 and SEQ ID NO: 565, SEQ ID NO: 566 and SEQ ID NO: 567, SEQ ID NO: 568 and SEQ ID NO: 569, SEQ ID NO: 570 and SEQ ID NO: 571, SEQ ID NO: 572 and SEQ ID NO: 573, SEQ ID NO: 574 and SEQ ID NO: 575, SEQ ID NO: 576 and SEQ ID NO: 577, SEQ ID NO: 578 and SEQ ID NO: 579, SEQ ID NO: 580 and SEQ ID NO: 581, SEQ ID NO: 582 and SEQ ID NO: 583, SEQ ID NO: 584 and SEQ ID NO: 585, SEQ ID NO: 586 and SEQ ID NO: 587, SEQ ID NO: 588 and SEQ ID NO: 589, SEQ ID NO: 590 and SEQ ID NO: 591, SEQ ID NO: 592 and SEQ ID NO: 593, SEQ ID NO: 594 and SEQ ID NO: 595, SEQ ID NO: 596 and SEQ ID NO: 597, SEQ ID NO: 598 and SEQ ID NO: 599, SEQ ID NO: 600 and SEQ ID NO: 601, SEQ ID NO: 602 and SEQ ID NO: 603, SEQ ID NO: 604 and SEQ ID NO: 605, SEQ ID NO: 606 and SEQ ID NO: 607, SEQ ID NO: 608 and SEQ ID NO: 609, SEQ ID NO: 610 and SEQ ID NO: 611, SEQ ID NO: 612 and SEQ ID NO: 613, SEQ ID NO: 614 and SEQ ID NO: 615, SEQ ID NO: 616 and SEQ ID NO: 617, SEQ ID NO: 618 and SEQ ID NO: 619, SEQ ID NO: 620 and SEQ ID NO: 621, SEQ ID NO: 622 and SEQ ID NO: 623, SEQ ID NO: 624 and SEQ ID NO: 625, SEQ ID NO: 626 and SEQ ID NO: 627, or SEQ ID NO: 630 and SEQ ID NO: 631, respectively.

[0188] In certain embodiments, the three to twelve identical binding domains of the multimeric binding molecule that specifically bind to a human coronavirus, e.g., MERS-CoV, comprise an antibody VH and a VL, where the VH and VL comprise amino acid sequences at least 80%, at least 85%, at least 90%, at least 95% or 100% identical to SEQ ID NO: 510 and SEQ ID NO: 511, SEQ ID NO: 512 and SEQ ID NO: 513, SEQ ID NO: 514 and SEQ ID NO: 515, SEQ ID NO: 516 and SEQ ID NO: 517, SEQ ID NO: 518 and SEQ ID NO: 519, SEQ ID NO: 520 and SEQ ID NO: 521, SEQ ID NO: 522 and SEQ ID NO: 523, SEQ ID NO: 524 and SEQ ID NO: 525, SEQ ID NO: 526 and SEQ ID NO: 527, SEQ ID NO: 528 and SEQ ID NO: 529, SEQ ID NO: 530 and SEQ ID NO: 531, SEQ ID NO: 532 and SEQ ID NO: 533, SEQ ID NO: 534 and SEQ ID NO: 535, SEQ ID NO: 536 and SEQ ID NO: 537, SEQ ID NO: 538 and SEQ ID NO: 539, SEQ ID NO: 540 and SEQ ID NO: 541, SEQ ID NO: 542 and SEQ ID NO: 543, SEQ ID NO: 544 and SEQ ID NO: 545, SEQ ID NO: 546 and SEQ ID NO: 547, SEQ ID NO: 548 and SEQ ID NO: 549, SEQ ID NO: 550 and SEQ ID NO: 551, SEQ ID NO: 552 and SEQ ID NO: 553, SEQ ID NO: 554 and SEQ ID NO: 555, SEQ ID NO: 556 and SEQ ID NO: 557, SEQ ID NO: 558 and SEQ ID NO: 559, SEQ ID NO: 560 and SEQ ID NO: 561, SEQ ID NO: 562 and SEQ ID NO: 563, SEQ ID NO: 564 and SEQ ID NO: 565, SEQ ID NO: 566 and SEQ ID NO: 567, SEQ ID NO: 568 and SEQ ID NO: 569, SEQ ID NO: 574 and SEQ ID NO: 575, SEQ ID NO: 576 and SEQ ID NO: 577, SEQ ID NO: 578 and SEQ ID NO: 579, SEQ ID NO: 580 and SEQ ID NO: 581, SEQ ID NO: 582 and SEQ ID NO: 583, SEQ ID NO: 584 and SEQ ID NO: 585, SEQ ID NO: 586 and SEQ ID NO: 587, SEQ ID NO: 588 and SEQ ID NO: 589, SEQ ID NO: 590 and SEQ ID NO: 591, SEQ ID NO: 592 and SEQ ID NO: 593, SEQ ID NO: 594 and SEQ ID NO: 595, SEQ ID NO: 596 and SEQ ID NO: 597, SEQ ID NO: 598 and SEQ ID NO: 599, SEQ ID NO: 600 and SEQ ID NO: 601, SEQ ID NO: 602 and SEQ ID NO: 603, SEQ ID NO: 604 and SEQ ID NO: 605, SEQ ID NO: 606 and SEQ ID NO: 607, SEQ ID NO: 608 and SEQ ID NO: 609, SEQ ID NO: 610 and SEQ ID NO: 611, SEQ ID NO: 612 and SEQ ID NO: 613, SEQ ID NO: 614 and SEQ ID NO: 615, SEQ ID NO: 616 and SEQ ID NO: 617, SEQ ID NO: 618 and SEQ ID NO: 619, SEQ ID NO: 620 and SEQ ID NO: 621, SEQ ID NO: 622 and SEQ ID NO: 623, SEQ ID NO: 624 and SEQ ID NO: 625, SEQ ID NO: 626 and SEQ ID NO: 627, or SEQ ID NO: 630 and SEQ ID NO: 631, respectively, wherein the bivalent reference IgG antibody comprising two of the binding domains that specifically bind to the human coronavirus can neutralize MERS-CoV.

[0189] In certain embodiments, the three to twelve identical binding domains of the multimeric binding molecule that specifically bind to a human coronavirus, e.g., SARS-CoV or SARS-CoV-2, comprise an antibody VH and a VL, where the VH and VL comprise amino acid sequences at least 80%, at least 85%, at least 90%, at least 95% or 100% identical to SEQ ID NO: 118 and SEQ ID NO: 119, SEQ ID NO: 162 and SEQ ID NO: 163, SEQ ID NO: 222 and SEQ ID NO: 223, SEQ ID NO: 260 and SEQ ID NO: 261, SEQ ID NO: 296 and SEQ ID NO: 297, SEQ ID NO: 384 and SEQ ID NO: 385, SEQ ID NO: 628 and SEQ ID NO: 629, SEQ ID NO: 632 and SEQ ID NO: 633, SEQ ID NO: 634 and SEQ ID NO: 635, SEQ ID NO: 636 and SEQ ID NO: 637, SEQ ID NO: 638 and SEQ ID NO: 639, SEQ ID NO: 640 and SEQ ID NO: 641, SEQ ID NO: 642 and SEQ ID NO: 643, SEQ ID NO: 644 and SEQ ID NO: 645, or SEQ ID NO: 646 and SEQ ID NO: 647, respectively, wherein the bivalent reference IgG antibody comprising two of the binding domains that specifically bind to the human coronavirus can neutralize SARS-CoV-2 and can bind SARS-CoV.

[0190] In certain embodiments, the three to twelve identical binding domains of the multimeric binding molecule that specifically bind to a human coronavirus, e.g., SARS-CoV or SARS-CoV-2, comprise an antibody VH and a VL, where the VH and VL comprise amino acid sequences at least 80%, at least 85%, at least 90%, at least 95% or 100% identical to SEQ ID NO: 260 and SEQ ID NO: 261, SEQ ID NO: 296 and SEQ ID NO: 297, SEQ ID NO: 384 and SEQ ID NO: 385, SEQ ID NO: 628 and SEQ ID NO: 629, SEQ ID NO: 632 and SEQ ID NO: 633, SEQ ID NO: 634 and SEQ ID NO: 635, SEQ ID NO: 636 and SEQ ID NO: 637, SEQ ID NO: 638 and SEQ ID NO: 639, SEQ ID NO: 640 and SEQ ID NO: 641, SEQ ID NO: 642 and SEQ ID NO: 643, SEQ ID NO: 644 and SEQ ID NO: 645, or SEQ ID NO: 646 and SEQ ID NO: 647, respectively with zero, one, or two single amino acid substitutions in one or more of the HCDRs or LCDRs, wherein the bivalent reference IgG antibody comprising two of the binding domains that specifically bind to the human coronavirus can neutralize SARS-CoV and SARS-CoV-2.

[0191] In certain embodiments, the three to twelve SARS-CoV2-binding domains comprise a single domain variable region (a “nanobody” or VHH), where the VHH comprises three immunoglobulin complementarity determining regions HCDR1, HCDR2, and HCDR3, where the HCDR1, HCDR2, and HCDR3 the CDRs of an antibody comprising the VHH of SEQ ID NO: 19, SEQ ID NO: 20, SEQ ID NO: 21, SEQ ID NO: 22, SEQ ID NO: 23, SEQ ID NO: 24, SEQ ID NO: 25, SEQ ID NO: 26, SEQ ID NO: 27, SEQ ID NO: 28, SEQ ID NO: 29, SEQ ID NO: 30, SEQ ID NO: 31, SEQ ID NO: 32, SEQ ID NO: 33, SEQ ID NO: 34, SEQ ID NO: 35, SEQ ID NO: 36, SEQ ID NO: 37, SEQ ID NO: 38, SEQ ID NO: 39, SEQ ID NO: 40, SEQ ID NO: 41, SEQ ID NO: 42, SEQ ID NO: 43, SEQ ID NO: 44, SEQ ID NO: 45, SEQ ID NO: 46, SEQ ID NO: 47, SEQ ID NO: 48, SEQ ID NO: 49, SEQ ID NO: 50, SEQ ID NO: 51, SEQ ID NO: 52, SEQ ID NO: 53, SEQ ID NO: 54, SEQ ID NO: 55, SEQ ID NO: 56, SEQ ID NO: 57, SEQ ID NO: 58, SEQ ID NO: 59, SEQ ID NO: 60, SEQ ID NO: 61, SEQ ID NO: 62, SEQ ID NO: 63, SEQ ID NO: 64, SEQ ID NO: 65, SEQ ID NO: 66, SEQ ID NO: 67, SEQ ID NO: 68, SEQ ID NO: 69, SEQ ID NO: 70, SEQ ID NO: 71, SEQ ID NO: 72, SEQ ID NO: 73, SEQ ID NO: 74, SEQ ID NO: 75, SEQ ID NO: 76, SEQ ID NO: 77, SEQ ID NO: 78, SEQ ID NO: 79, SEQ ID NO: 80, SEQ ID NO: 81, SEQ ID NO: 82, or SEQ ID NO: 83 with zero, one, or two single amino acid substitutions in one or more of the HCDRs. In certain embodiments, the three to twelve SARS-CoV2-binding domains comprise a single domain variable region (VHH), where the VHH comprises three immunoglobulin complementarity determining regions HCDR1, HCDR2, and HCDR3, where the HCDR1, HCDR2, and HCDR3 the CDRs of an antibody comprising the VHH of SEQ ID NO: 83 with zero, one, or two single amino acid substitutions in one or more of the HCDRs.

[0192] In certain embodiments, the three to twelve SARS-CoV2-binding domains of the binding molecule comprise an antibody VHH, where the VHH comprises an amino acid sequence at least 80%, at least 85%, at least 90%, at least 95% or 100% identical to SEQ ID NO: 19, SEQ ID NO: 20, SEQ ID NO: 21, SEQ ID NO: 22, SEQ ID NO: 23, SEQ ID NO: 24, SEQ ID NO: 25, SEQ ID NO: 26, SEQ ID NO: 27, SEQ ID NO: 28, SEQ ID NO: 29, SEQ ID NO: 30, SEQ ID NO: 31, SEQ ID NO: 32, SEQ ID NO: 33, SEQ ID NO: 34, SEQ ID NO: 35, SEQ ID NO: 36, SEQ ID NO: 37, SEQ ID NO: 38, SEQ ID NO: 39, SEQ ID NO: 40, SEQ ID NO: 41, SEQ ID NO: 42, SEQ ID NO: 43, SEQ ID NO: 44, SEQ ID NO: 45, SEQ ID NO: 46, SEQ ID NO: 47, SEQ ID NO: 48, SEQ ID NO: 49, SEQ ID NO: 50, SEQ ID NO: 51, SEQ ID NO: 52, SEQ ID NO: 53, SEQ ID NO: 54, SEQ ID NO: 55, SEQ ID NO: 56, SEQ ID NO: 57, SEQ ID NO: 58, SEQ ID NO: 59, SEQ ID NO: 60, SEQ ID NO: 61, SEQ ID NO: 62, SEQ ID NO: 63, SEQ ID NO: 64, SEQ ID NO: 65, SEQ ID NO: 66, SEQ ID NO: 67, SEQ ID NO: 68, SEQ ID NO: 69, SEQ ID NO: 70, SEQ ID NO: 71, SEQ ID NO: 72, SEQ ID NO: 73, SEQ ID NO: 74, SEQ ID NO: 75, SEQ ID NO: 76, SEQ ID NO: 77, SEQ ID NO: 78, SEQ ID NO: 79, SEQ ID NO: 80, SEQ ID NO: 81, SEQ ID NO: 82, or SEQ ID NO: 83 such as the amino acid sequences at least 80%, at least 85%, at least 90%, at least 95% or 100% identical to SEQ ID NO: 83.

[0193] In certain embodiments, the three to twelve identical binding domains of the multimeric binding molecule that specifically bind to a human coronavirus, e.g., SARS-CoV or SARS-CoV-2, comprise an extracellular SARS-CoV or SARS-CoV-2 RBD-binding fragment of angiotensin-converting enzyme 2 (ACE2). In certain embodiments, the three to twelve human coronavirus binding domains, e.g., SARS-CoV-2-binding domains of the binding molecule comprise an extracellular SARS-CoV or SARS-CoV-2 RBD-binding fragment of SEQ ID NO: 14. In certain embodiments, the three to twelve human coronavirus binding domains, e.g., SARS-CoV-2-binding domains, of the binding molecule comprise an amino acid sequence at least 80%, at least 85%, at least 90%, at least 95% or 100% identical to amino acids 18 to 740 of SEQ ID NO: 14. In certain embodiments the multimeric binding molecule is a pentameric or hexameric binding molecule comprising three to twelve IgM, IgM-like, or IgM-derived heavy chains each comprising at least the Cμ3, Cμ4, and tailpiece (tp) domains corresponding to an IgM heavy chain, e.g., a human IgM heavy chain fused to an extracellular domain of ACE2, e.g., human ACE2, e.g., an amino acid sequence at least 80%, at least 85%, at least 90%, at least 95% or 100% identical to amino acids 18 to 740 of SEQ ID NO: 14. In certain embodiments the heavy chains comprise the Cμ3, Cμ4, and tailpiece (tp) domains corresponding to an IgM heavy chain, e.g., a human IgM heavy chain with a modified human IgG1 hinge region fused to the N-terminus where the cysteine at position 7 of the human IgG1 hinge region is substituted with serine, e.g., amino acids 724 to 741 of SEQ ID NO: 15 (VEPKSSD KTHTCPPCPA P). In certain embodiments the binding molecule is engineered to reduce or eliminate complement-mediated cytotoxicity, e.g., comprising amino acid substitutions P311A, P313S corresponding to the positions in SEQ ID NO: 1 and SEQ ID NO: 2, or comprising the amino acid substitution K315D corresponding to the position in SEQ ID NO: 1 and SEQ ID NO: 2. In certain embodiments the multimeric binding molecule comprises ten or twelve heavy chains comprising the amino acid sequence SEQ ID NO: 15.

[0194] In certain embodiments, the three to twelve identical binding domains of the multimeric binding molecule that specifically bind to a human coronavirus, e.g., SARS-CoV-1, comprise a heavy chain variable region (VH) and a light chain variable region (VL), where the VH and VL comprise six immunoglobulin complementarity determining regions HCDR1, HCDR2, HCDR3, LCDR1, LCDR2, and LCDR3, where the HCDR1, HCDR2, HCDR3, LCDR1, LCDR2, and LCDR3 comprise the CDRs of an antibody comprising the VH and VL of SEQ ID NO: 84 and SEQ ID NO: 85, or SEQ ID NO: 262 and SEQ ID NO: 263, respectively, with zero, one, or two single amino acid substitutions in one or more of the HCDRs or LCDRs.

[0195] In certain embodiments, the three to twelve identical binding domains of the multimeric binding molecule that specifically bind to a human coronavirus, e.g., SARS-CoV-1, comprise an antibody VH and a VL, where the VH and VL comprise amino acid sequences at least 80%, at least 85%, at least 90%, at least 95% or 100% identical to SEQ ID NO: 84 and SEQ ID NO: 85, or SEQ ID NO: 262 and SEQ ID NO: 263, respectively.

[0196] In certain embodiments, the three to twelve identical binding domains of the multimeric binding molecule that specifically bind to a human coronavirus, e.g., SARS-CoV-2, comprise a heavy chain variable region (VH) and a light chain variable region (VL), where the VH and VL comprise six immunoglobulin complementarity determining regions HCDR1, HCDR2, HCDR3, LCDR1, LCDR2, and LCDR3, where the HCDR1, HCDR2, HCDR3, LCDR1, LCDR2, and LCDR3 comprise the CDRs of an antibody comprising the VH and VL of SEQ ID NO: 256 and SEQ ID NO: 257, respectively, with zero, one, or two single amino acid substitutions in one or more of the HCDRs or LCDRs.

[0197] In certain embodiments, the three to twelve identical binding domains of the multimeric binding molecule that specifically bind to a human coronavirus, e.g., SARS-CoV-2, comprise an antibody VH and a VL, where the VH and VL comprise amino acid sequences at least 80%, at least 85%, at least 90%, at least 95% or 100% identical to SEQ ID NO: 256 and SEQ ID NO: 257, respectively.

[0198] In certain embodiments, the three to twelve identical binding domains of the multimeric binding molecule that specifically bind to a human coronavirus, e.g., SARS-CoV-2, comprise a heavy chain variable region (VH) and a light chain variable region (VL), where the VH and VL comprise six immunoglobulin complementarity determining regions HCDR1, HCDR2, HCDR3, LCDR1, LCDR2, and LCDR3, where the HCDR1, HCDR2, HCDR3, LCDR1, LCDR2, and LCDR3 comprise the CDRs of an antibody comprising the VH and VL of SEQ ID NO: 260 and SEQ ID NO: 261, respectively, with zero, one, or two single amino acid substitutions in one or more of the HCDRs or LCDRs.

[0199] In certain embodiments, the three to twelve identical binding domains of the multimeric binding molecule that specifically bind to a human coronavirus, e.g., SARS-CoV-2, comprise an antibody VH and a VL, where the VH and VL comprise amino acid sequences at least 80%, at least 85%, at least 90%, at least 95% or 100% identical to SEQ ID NO: 260 and SEQ ID NO: 261, respectively.

[0200] In certain embodiments, the three to twelve identical binding domains of the multimeric binding molecule that specifically bind to a human coronavirus, e.g., SARS-CoV-2, comprise a heavy chain variable region (VH) and a light chain variable region (VL), where the VH and VL comprise six immunoglobulin complementarity determining regions HCDR1, HCDR2, HCDR3, LCDR1, LCDR2, and LCDR3, where the HCDR1, HCDR2, HCDR3, LCDR1, LCDR2, and LCDR3 comprise the CDRs of an antibody comprising the VH and VL of SEQ ID NO: 264 and SEQ ID NO: 265, or SEQ ID NO: 266 and SEQ ID NO: 267, respectively, with zero, one, or two single amino acid substitutions in one or more of the HCDRs or LCDRs.

[0201] In certain embodiments, the three to twelve identical binding domains of the multimeric binding molecule that specifically bind to a human coronavirus, e.g., SARS-CoV-2, comprise an antibody VH and a VL, where the VH and VL comprise amino acid sequences at least 80%, at least 85%, at least 90%, at least 95% or 100% identical to SEQ ID NO: 264 and SEQ ID NO: 265, or SEQ ID NO: 266 and SEQ ID NO: 267, respectively.

[0202] In certain embodiments, the three to twelve identical binding domains of the multimeric binding molecule that specifically bind to a human coronavirus, e.g., SARS-CoV-2, comprise a heavy chain variable region (VH) and a light chain variable region (VL), where the VH and VL comprise six immunoglobulin complementarity determining regions HCDR1, HCDR2, HCDR3, LCDR1, LCDR2, and LCDR3, where the HCDR1, HCDR2, HCDR3, LCDR1, LCDR2, and LCDR3 comprise the CDRs of an antibody comprising the VH and VL of SEQ ID NO: 88 and SEQ ID NO: 89, respectively, with zero, one, or two single amino acid substitutions in one or more of the HCDRs or LCDRs.

[0203] In certain embodiments, the three to twelve identical binding domains of the multimeric binding molecule that specifically bind to a human coronavirus, e.g., SARS-CoV-2, comprise an antibody VH and a VL, where the VH and VL comprise amino acid sequences at least 80%, at least 85%, at least 90%, at least 95% or 100% identical to SEQ ID NO: 88 and SEQ ID NO: 89, respectively.

[0204] In certain embodiments, the three to twelve identical binding domains of the multimeric binding molecule that specifically bind to a human coronavirus, e.g., SARS-CoV-2, comprise a heavy chain variable region (VH) and a light chain variable region (VL), where the VH and VL comprise six immunoglobulin complementarity determining regions HCDR1, HCDR2, HCDR3, LCDR1, LCDR2, and LCDR3, where the HCDR1, HCDR2, HCDR3, LCDR1, LCDR2, and LCDR3 comprise the CDRs of an antibody comprising the VH and VL of SEQ ID NO: 268 and SEQ ID NO: 269, respectively, with zero, one, or two single amino acid substitutions in one or more of the HCDRs or LCDRs.

[0205] In certain embodiments, the three to twelve identical binding domains of the multimeric binding molecule that specifically bind to a human coronavirus, e.g., SARS-CoV-2, comprise an antibody VH and a VL, where the VH and VL comprise amino acid sequences at least 80%, at least 85%, at least 90%, at least 95% or 100% identical to SEQ ID NO: 268 and SEQ ID NO: 269, respectively.

[0206] In certain embodiments, the three to twelve identical binding domains of the multimeric binding molecule that specifically bind to a human coronavirus, e.g., SARS-CoV-2, comprise a heavy chain variable region (VH) and a light chain variable region (VL), where the VH and VL comprise six immunoglobulin complementarity determining regions HCDR1, HCDR2, HCDR3, LCDR1, LCDR2, and LCDR3, where the HCDR1, HCDR2, HCDR3, LCDR1, LCDR2, and LCDR3 comprise the CDRs of an antibody comprising the VH and VL of SEQ ID NO: 270 and SEQ ID NO: 271, respectively, with zero, one, or two single amino acid substitutions in one or more of the HCDRs or LCDRs.

[0207] In certain embodiments, the three to twelve identical binding domains of the multimeric binding molecule that specifically bind to a human coronavirus, e.g., SARS-CoV-2, comprise an antibody VH and a VL, where the VH and VL comprise amino acid sequences at least 80%, at least 85%, at least 90%, at least 95% or 100% identical to SEQ ID NO: 270 and SEQ ID NO: 271, respectively.

[0208] In certain embodiments, the three to twelve identical binding domains of the multimeric binding molecule that specifically bind to a human coronavirus, e.g., SARS-CoV-2, comprise a heavy chain variable region (VH) and a light chain variable region (VL), where the VH and VL comprise six immunoglobulin complementarity determining regions HCDR1, HCDR2, HCDR3, LCDR1, LCDR2, and LCDR3, where the HCDR1, HCDR2, HCDR3, LCDR1, LCDR2, and LCDR3 comprise the CDRs of an antibody comprising the VH and VL of SEQ ID NO: 272 and SEQ ID NO: 273, SEQ ID NO: 274 and SEQ ID NO: 275, SEQ ID NO: 276 and SEQ ID NO: 277, SEQ ID NO: 278 and SEQ ID NO: 279, SEQ ID NO: 280 and SEQ ID NO: 281, SEQ ID NO: 282 and SEQ ID NO: 283, respectively, with zero, one, or two single amino acid substitutions in one or more of the HCDRs or LCDRs.

[0209] In certain embodiments, the three to twelve identical binding domains of the multimeric binding molecule that specifically bind to a human coronavirus, e.g., SARS-CoV-2, comprise an antibody VH and a VL, where the VH and VL comprise amino acid sequences at least 80%, at least 85%, at least 90%, at least 95% or 100% identical to SEQ ID NO: 272 and SEQ ID NO: 273, SEQ ID NO: 274 and SEQ ID NO: 275, SEQ ID NO: 276 and SEQ ID NO: 277, SEQ ID NO: 278 and SEQ ID NO: 279, SEQ ID NO: 280 and SEQ ID NO: 281, SEQ ID NO: 282 and SEQ ID NO: 283, respectively.

[0210] In certain embodiments, the three to twelve identical binding domains of the multimeric binding molecule that specifically bind to a human coronavirus, e.g., SARS-CoV-2, comprise a heavy chain variable region (VH) and a light chain variable region (VL), where the VH and VL comprise six immunoglobulin complementarity determining regions HCDR1, HCDR2, HCDR3, LCDR1, LCDR2, and LCDR3, where the HCDR1, HCDR2, HCDR3, LCDR1, LCDR2, and LCDR3 comprise the CDRs of an antibody comprising the VH and VL of SEQ ID NO: 284 and SEQ ID NO: 285, SEQ ID NO: 286 and SEQ ID NO: 287, SEQ ID NO: 288 and SEQ ID NO: 289, SEQ ID NO: 290 and SEQ ID NO: 291, respectively, with zero, one, or two single amino acid substitutions in one or more of the HCDRs or LCDRs.

[0211] In certain embodiments, the three to twelve identical binding domains of the multimeric binding molecule that specifically bind to a human coronavirus, e.g., SARS-CoV-2, comprise an antibody VH and a VL, where the VH and VL comprise amino acid sequences at least 80%, at least 85%, at least 90%, at least 95% or 100% identical to SEQ ID NO: 284 and SEQ ID NO: 285, SEQ ID NO: 286 and SEQ ID NO: 287, SEQ ID NO: 288 and SEQ ID NO: 289, SEQ ID NO: 290 and SEQ ID NO: 291, respectively.

[0212] In certain embodiments, the three to twelve identical binding domains of the multimeric binding molecule that specifically bind to a human coronavirus, e.g., SARS-CoV-2, comprise a heavy chain variable region (VH) and a light chain variable region (VL), where the VH and VL comprise six immunoglobulin complementarity determining regions HCDR1, HCDR2, HCDR3, LCDR1, LCDR2, and LCDR3, where the HCDR1, HCDR2, HCDR3, LCDR1, LCDR2, and LCDR3 comprise the CDRs of an antibody comprising the VH and VL of SEQ ID NO: 292 and SEQ ID NO: 293, respectively, with zero, one, or two single amino acid substitutions in one or more of the HCDRs or LCDRs.

[0213] In certain embodiments, the three to twelve identical binding domains of the multimeric binding molecule that specifically bind to a human coronavirus, e.g., SARS-CoV-2, comprise an antibody VH and a VL, where the VH and VL comprise amino acid sequences at least 80%, at least 85%, at least 90%, at least 95% or 100% identical to SEQ ID NO: 292 and SEQ ID NO: 293, respectively.

[0214] In certain embodiments, the three to twelve identical binding domains of the multimeric binding molecule that specifically bind to a human coronavirus, e.g., SARS-CoV and SARS-CoV-2, comprise a heavy chain variable region (VH) and a light chain variable region (VL), where the VH and VL comprise six immunoglobulin complementarity determining regions HCDR1, HCDR2, HCDR3, LCDR1, LCDR2, and LCDR3, where the HCDR1, HCDR2, HCDR3, LCDR1, LCDR2, and LCDR3 comprise the CDRs of an antibody comprising the VH and VL of SEQ ID NO: 384 and SEQ ID NO: 385, respectively, with zero, one, or two single amino acid substitutions in one or more of the HCDRs or LCDRs.

[0215] In certain embodiments, the three to twelve identical binding domains of the multimeric binding molecule that specifically bind to a human coronavirus, e.g., SARS-CoV and SARS-CoV-2, comprise an antibody VH and a VL, where the VH and VL comprise amino acid sequences at least 80%, at least 85%, at least 90%, at least 95% or 100% identical to SEQ ID NO: 384 and SEQ ID NO: 385, respectively.

[0216] In certain embodiments, the three to twelve identical binding domains of the multimeric binding molecule that specifically bind to a human coronavirus, e.g., SARS-CoV and SARS-CoV-2, comprise a heavy chain variable region (VH) and a light chain variable region (VL), where the VH and VL comprise six immunoglobulin complementarity determining regions HCDR1, HCDR2, HCDR3, LCDR1, LCDR2, and LCDR3, where the HCDR1, HCDR2, HCDR3, LCDR1, LCDR2, and LCDR3 comprise the CDRs of an antibody comprising the VH and VL of SEQ ID NO: 646 and SEQ ID NO: 647, respectively, with zero, one, or two single amino acid substitutions in one or more of the HCDRs or LCDRs.

[0217] In certain embodiments, the three to twelve identical binding domains of the multimeric binding molecule that specifically bind to a human coronavirus, e.g., SARS-CoV and SARS-CoV-2, comprise an antibody VH and a VL, where the VH and VL comprise amino acid sequences at least 80%, at least 85%, at least 90%, at least 95% or 100% identical to SEQ ID NO: 646 and SEQ ID NO: 647, respectively.

[0218] In certain embodiments, the three to twelve identical binding domains of the multimeric binding molecule that specifically bind to a human coronavirus, e.g., SARS-CoV-2, comprise a heavy chain variable region (VH) and a light chain variable region (VL), where the VH and VL comprise six immunoglobulin complementarity determining regions HCDR1, HCDR2, HCDR3, LCDR1, LCDR2, and LCDR3, where the HCDR1, HCDR2, HCDR3, LCDR1, LCDR2, and LCDR3 comprise the CDRs of an antibody comprising the VH and VL of SEQ ID NO: 654 and SEQ ID NO: 655, respectively, with zero, one, or two single amino acid substitutions in one or more of the HCDRs or LCDRs.

[0219] In certain embodiments, the three to twelve identical binding domains of the multimeric binding molecule that specifically bind to a human coronavirus, e.g., SARS-CoV-2, comprise an antibody VH and a VL, where the VH and VL comprise amino acid sequences at least 80%, at least 85%, at least 90%, at least 95% or 100% identical to SEQ ID NO: 654 and SEQ ID NO: 655, respectively.

[0220] In certain embodiments, the three to twelve identical binding domains of the multimeric binding molecule that specifically bind to a human coronavirus, e.g., MERS-CoV, comprise a heavy chain variable region (VH) and a light chain variable region (VL), where the VH and VL comprise six immunoglobulin complementarity determining regions HCDR1, HCDR2, HCDR3, LCDR1, LCDR2, and LCDR3, where the HCDR1, HCDR2, HCDR3, LCDR1, LCDR2, and LCDR3 comprise the CDRs of an antibody comprising the VH and VL of SEQ ID NO: 522 and SEQ ID NO: 523, SEQ ID NO: 576 and SEQ ID NO: 577, SEQ ID NO: 610 and SEQ ID NO: 611, SEQ ID NO: 612 and SEQ ID NO: 613, MERS-4, or SEQ ID NO: 630 and SEQ ID NO: 631, respectively, with zero, one, or two single amino acid substitutions in one or more of the HCDRs or LCDRs.

[0221] In certain embodiments, the three to twelve identical binding domains of the multimeric binding molecule that specifically bind to a human coronavirus, e.g., MERS-CoV, comprise an antibody VH and a VL, where the VH and VL comprise amino acid sequences at least 80%, at least 85%, at least 90%, at least 95% or 100% identical to SEQ ID NO: 522 and SEQ ID NO: 523, SEQ ID NO: 576 and SEQ ID NO: 577, SEQ ID NO: 610 and SEQ ID NO: 611, SEQ ID NO: 612 and SEQ ID NO: 613, SEQ ID NO: 614 and SEQ ID NO: 615, or SEQ ID NO: 630 and SEQ ID NO: 631, respectively.

### IgM Antibodies, IgM-Like Antibodies, Other IgM-Derived Binding Molecules

[0222] IgM is the first immunoglobulin produced by B cells in response to stimulation by antigen. Naturally occurring IgM is naturally present at around 1.5 mg/ml in serum with a half-life of about 5 days. IgM is a pentameric or hexameric molecule and thus includes five or six binding units. An IgM binding unit typically includes two light and two heavy chains. While an IgG heavy chain constant region contains three heavy chain constant domains (CH1, CH2 and CH3), the heavy (μ) constant region of IgM additionally contains a fourth constant domain (CH4) and includes a C-terminal “tailpiece.” The human IgM constant region typically comprises the amino acid sequence SEQ ID NO: 1 (identical to, e.g., GenBank Accession Nos. pir∥S37768, CAA47708.1, and CAA47714.1, allele IGHM*03) or SEQ ID NO: 2 (identical to, e.g., GenBank Accession No. sp|P01871.4, allele IGHM*04). The human Cμ1 region ranges from about amino acid 5 to about amino acid 102 of SEQ ID NO: 1 or SEQ ID NO: 2; the human Cμ2 region ranges from about amino acid 114 to about amino acid 205 of SEQ ID NO: 1 or SEQ ID NO: 2, the human Cμ3 region ranges from about amino acid 224 to about amino acid 319 of SEQ ID NO: 1 or SEQ ID NO: 2, the Cμ4 region ranges from about amino acid 329 to about amino acid 430 of SEQ ID NO: 1 or SEQ ID NO: 2, and the tailpiece ranges from about amino acid 431 to about amino acid 453 of SEQ ID NO: 1 or SEQ ID NO: 2.

[0223] Other forms and alleles of the human IgM constant region with minor sequence variations exist, including, without limitation, GenBank Accession Nos. CAB37838.1, and pir∥HHU. The amino acid substitutions, insertions, and/or deletions at positions corresponding to SEQ ID NO: 1 or SEQ ID NO: 2 described and claimed elsewhere in this disclosure can likewise be incorporated into alternate human IgM sequences, as well as into IgM constant region amino acid sequences of other species.

[0224] Each IgM heavy chain constant region can be associated with a binding domain, e.g., an antigen-binding domain, e.g., a scFv or VHH, or a subunit of an antigen-binding domain, e.g., a VH region. Exemplary antigen-binding domains, e.g., binding domains that bind SARS-CoV-2 are described elsewhere herein. In certain embodiments the binding domain can be a non-antibody binding domain, e.g., an ACE-2 ectodomain.

[0225] Five IgM binding units can form a complex with an additional small polypeptide chain (the J-chain), or a functional fragment, variant, or derivative thereof, to form a pentameric IgM antibody or IgM-like antibody, as discussed elsewhere herein. The precursor form of the human J-chain is presented as SEQ ID NO: 6. The signal peptide extends from amino acid 1 to about amino acid 22 of SEQ ID NO: 6, and the mature human J-chain extends from about amino acid 23 to amino acid 159 of SEQ ID NO: 6. The mature human J-chain includes the amino acid sequence SEQ ID NO: 7.

[0226] Exemplary variant and modified J-chains are provided elsewhere herein. Without the J-chain, an IgM antibody or IgM-like antibody typically assembles into a hexamer, comprising up to twelve antigen-binding domains. With a J-chain, an IgM antibody or IgM-like antibody typically assembles into a pentamer, comprising up to ten antigen-binding domains, or more, if the J-chain is a modified J-chain comprising one or more heterologous polypeptides comprising additional antigen-binding domain(s). The assembly of five or six IgM binding units into a pentameric or hexameric IgM antibody or IgM-like antibody is thought to involve the Cμ4 and tailpiece domains. See, e.g., Braathen, R., et al., J. Biol. Chem. 277:42755-42762 (2002). Accordingly, a pentameric or hexameric IgM antibody provided in this disclosure typically includes at least the Cμ4 and tailpiece domains (also referred to herein collectively as Cμ4-tp). A “multimerizing fragment” of an IgM heavy chain constant region thus includes at least the Cμ4-tp domains. An IgM heavy chain constant region can additionally include a Cμ3 domain or a fragment thereof, a Cμ2 domain or a fragment thereof, a Cμ1 domain or a fragment thereof, and/or other IgM heavy chain domains. In certain embodiments, an IgM-derived binding molecule, e.g., an IgM antibody, IgM-like antibody, or other IgM-derived binding molecule as provided herein can include a complete IgM heavy (μ) chain constant domain, e.g., SEQ ID NO: 1 or SEQ ID NO: 2, or a variant, derivative, or analog thereof, e.g., as provided herein.

[0227] In certain embodiments, the disclosure provides a multimeric binding molecule, e.g., a pentameric or hexameric binding molecule, where the binding molecule includes ten or twelve IgM-derived heavy chains, and where the IgM-derived heavy chains comprise IgM heavy chain constant regions each associated with a binding domain that specifically binds to a target. In certain embodiments, the disclosure provides an IgM antibody, IgM-like antibody, or IgM-derived binding molecule that includes five or six bivalent binding units, where each binding unit includes two IgM or IgM-like heavy chain constant regions or multimerizing fragments or variants thereof, each associated with an antigen-binding domain or subunit thereof. In certain embodiments, the two IgM heavy chain constant regions included in each binding unit are human heavy chain constant regions. In some embodiments, the heavy chains are glycosylated. In some embodiments, the heavy chains can be mutated to affect glycosylation.

[0228] Where the IgM antibody, IgM-like antibody, or other IgM-derived binding molecule provided in this disclosure is pentameric, the IgM antibody, IgM-like antibody, or other IgM-derived binding molecule typically further includes a J-chain, or functional fragment or variant thereof. In certain embodiments, the J-chain is a modified J-chain or variant thereof that further comprises one or more heterologous moieties attached to the J-chain, as described elsewhere herein. In certain embodiments, the J-chain can be mutated to affect, e.g., enhance, the serum half-life of the IgM antibody, IgM-like antibody, or other IgM-derived binding molecule provided herein, as discussed elsewhere in this disclosure. In certain embodiments the J-chain can be mutated to affect glycosylation and/or serum half-life of the binding molecule, as discussed elsewhere in this disclosure.

[0229] An IgM heavy chain constant region can include one or more of a Cμ11 domain or fragment or variant thereof, a Cμ2 domain or fragment or variant thereof, a Cμ3 domain or fragment or variant thereof, a Cμ4 domain or fragment or variant thereof, and/or an IgM tailpiece, provided that the constant region can serve a desired function in the IgM antibody, IgM-like antibody, or other IgM-derived binding molecule, e.g., associate with second IgM constant region to form a binding unit with one, two, or more antigen-binding domain(s), and/or associate with other binding units (and in the case of a pentamer, a J-chain) to form a hexamer or a pentamer. In certain embodiments the two IgM heavy chain constant regions or fragments or variants thereof within an individual binding unit each comprise a Cμ4 domain or fragment or variant thereof, a tailpiece (tp) or fragment or variant thereof, or a combination of a Cμ4 domain and a tp or fragment or variant thereof. In certain embodiments the two IgM heavy chain constant regions or fragments or variants thereof within an individual binding unit each further comprise a Cμ3 domain or fragment or variant thereof, a Cμ2 domain or fragment or variant thereof, a Cμ1 domain or fragment or variant thereof, or any combination thereof.

[0230] In some embodiments, the binding units of the IgM antibody, IgM-like antibody, or other IgM-derived binding molecule each comprise two light chains. In some embodiments, the binding units of the IgM antibody, IgM-like antibody, or other IgM-derived binding molecule each comprise two fragments of light chains. In some embodiments, the light chains are kappa light chains. In some embodiments, the light chains are lambda light chains. In some embodiments, the light chains are hybrid kappa-lambda light chains. In some embodiments, each binding unit comprises two immunoglobulin light chains each comprising a VL situated amino terminal to an immunoglobulin light chain constant region.

### IgA Antibodies, IgA-Like Antibodies, Other IgA-Derived Binding Molecules

[0231] IgA plays a critical role in mucosal immunity and comprises about 15% of total immunoglobulin produced. IgA can be monomeric or multimeric, forming primarily dimeric molecules, but can also assemble as trimers, tetramers, and/or pentamers. See, e.g., de Sousa-Pereira, P., and J. M. Woof, Antibodies 8:57 (2019). An IgA binding unit typically includes two light and two heavy chains. IgA contains three heavy chain constant region domains (Cα1, Cα2 and Cα3), a hinge region between Cα1 and Cα2, and includes a C-terminal “tailpiece.” Human IgA has two subtypes, IgA1 and IgA2. The human IgA1 constant region typically includes the amino acid sequence SEQ ID NO: 3. The human Cα1 domain extends from about amino acid 6 to about amino acid 98 of SEQ ID NO: 3; the human IgA1 hinge region extends from about amino acid 102 to about amino acid 124 of SEQ ID NO: 3, the human Cα3 domain extends from about amino acid 228 to about amino acid 330 of SEQ ID NO: 3, and the tailpiece extends from about amino acid 331 to about amino acid 352 of SEQ ID NO: 3. The human IgA2 constant region typically includes the amino acid sequence SEQ ID NO: 4. The human Cal domain extends from about amino acid 6 to about amino acid 98 of SEQ ID NO: 4; the human IgA2 hinge region extends from about amino acid 102 to about amino acid 111 of SEQ ID NO: 4, the human Cα2 domain extends from about amino acid 113 to about amino acid 206 of SEQ ID NO: 4, the human Cα3 domain extends from about amino acid 215 to about amino acid 317 of SEQ ID NO: 4, and the tailpiece extends from about amino acid 318 to about amino acid 340 of SEQ ID NO: 4.

[0232] Two IgA binding units can form a complex with two additional polypeptide chains, the J-chain (e.g., the mature human J-chain of SEQ ID NO: 7) and the secretory component (precursor, SEQ ID NO: 5, mature: amino acids 19 to 603 of SEQ ID NO: 5) to form a secretory IgA (sIgA) antibody. The assembly of IgA binding units into a dimeric sIgA antibody is thought to involve the Cα3 and tailpiece domains (also referred to herein collectively as the Cα3-tp domain). Accordingly, a dimeric sIgA antibody provided in this disclosure typically includes IgA constant regions that include at least the Cα3 and tailpiece domains. Four IgA binding units can likewise form a tetramer complex with a J-chain. A sIgA antibody can also form as a higher order multimer, e.g., a tetramer or pentamer.

[0233] An IgA heavy chain constant region can additionally include a Cα2 domain or a fragment thereof, an IgA hinge region, a Cα1 domain or a fragment thereof, and/or other IgA heavy chain domains. In certain aspects, an IgA antibody or IgA-like binding molecule as provided herein can include a complete IgA heavy (u) chain constant domain (e.g., SEQ ID NO: 3 or SEQ ID NO: 4), or a variant, derivative, or analog thereof. In some embodiments, the IgA heavy chain constant regions or multimerizing fragments thereof are human IgA constant regions.

[0234] In some embodiments, each binding unit of an IgA antibody, IgA-like antibody, or other IgA-derived binding molecule comprises two light chains. In some embodiments, each binding unit of an IgA antibody, IgA-like antibody, or other IgA-derived binding molecule comprises two fragments of light chains. In some embodiments, the light chains are kappa light chains. In some embodiments, the light chains are lambda light chains. In some embodiments the light chains are hybrid kappa-lambda light chains. In some embodiments, each binding unit comprises two immunoglobulin light chains each comprising a VL situated amino terminal to an immunoglobulin light chain constant region.

### J-Chains and Functional Fragments or Variants Thereof

[0235] In certain embodiments, the multimeric binding molecule provided herein comprises a J-chain or functional fragment or variant thereof. In certain embodiments, the multimeric binding molecule provided herein is pentameric and comprises a J-chain or functional fragment or variant thereof. In certain embodiments, the multimeric binding molecule provided herein is a dimeric IgA molecule or a pentameric IgM molecule and comprises a J-chain or functional fragment or variant thereof. In some embodiments, the multimeric binding molecule can comprise a naturally occurring J-chain sequence, such as a mature human J-chain sequence (e.g., SEQ ID NO: 7). Alternatively, in some embodiments, the multimeric binding molecule can comprise a variant J-chain sequence, such as a variant sequence described herein with reduced glycosylation or reduced binding to one or more polymeric Ig receptors (e.g., pIgR, Fc alpha-mu receptor (FcαμR), or Fc mu receptor (FcμR)). See, e.g., U.S. Pat. No. 10,899,835, which is incorporated herein by reference in its entirety. In some embodiments, the multimeric binding molecule can comprise a functional fragment of a naturally occurring or variant J-chain. As persons of ordinary skill in the art will recognize, “a functional fragment” or a “functional variant” in this context includes those fragments and variants that can associate with binding units, e.g., IgM or IgA heavy chain constant regions, to form a pentameric IgM antibody, IgM-like antibody, or IgM-derived binding molecule or a dimeric IgA antibody, IgA-like antibody, or IgA-derived binding molecule, and/or can associate with certain immunoglobulin receptors, e.g., the polymeric immunoglobulin receptor (pIgR).

[0236] In certain embodiments, the J-chain can be modified, e.g., by introduction of a heterologous moiety, or two or more heterologous moieties, e.g., polypeptides, without interfering with the ability of binding molecule to assemble and bind to its binding target(s). See U.S. Pat. Nos. 9,951,134, 10,400,038, 10,618,978, and in U.S. Patent Application Publication No. US-2019-0185570, each of which is incorporated herein by reference in its entirety.

[0237] Accordingly, a binding molecule provided by this disclosure, including multispecific IgA, IgA-like, IgM, or IgM-like antibodies as described elsewhere herein, can comprise a modified J-chain or functional fragment or variant thereof comprising a heterologous moiety, e.g., a heterologous polypeptide, introduced, e.g., fused or chemically conjugated, into the J-chain or fragment or variant thereof. In certain embodiments, the heterologous polypeptide can be fused to the N-terminus of the J-chain or functional fragment or variant thereof, the C-terminus of the J-chain or functional fragment or variant thereof, or to both the N-terminus and C-terminus of the J-chain or functional fragment or variant thereof. In certain embodiments the heterologous polypeptide can be fused internally within the J-chain or functional fragment or variant thereof. In some embodiments, the heterologous polypeptide can be introduced into the J-chain at or near a glycosylation site. In some embodiments, the heterologous polypeptide can be introduced into the J-chain within about 10 amino acid residues from the C-terminus, or within about 10 amino acids from the N-terminus. In certain embodiments, the heterologous polypeptide can be introduced into the mature human J-chain of SEQ ID NO: 7 between cysteine residues 92 and 101 of SEQ ID NO: 7, or an equivalent location in a J-chain sequence, e.g., a J-chain variant or functional fragment of a J-chain. In a further embodiment, the heterologous polypeptide can be introduced into the mature human J-chain of SEQ ID NO: 7 at or near a glycosylation site. In a further embodiment, the heterologous polypeptide can be introduced into the mature human J-chain of SEQ ID NO: 7 within about 10 amino acid residues from the C-terminus, or within about 10 amino acids from the N-terminus.

[0238] In certain embodiments the heterologous moiety can be a peptide or polypeptide sequence fused in frame to the J-chain or chemically conjugated to the J-chain or fragment or variant thereof. In certain embodiments, the heterologous polypeptide is fused to the J-chain or functional fragment thereof via a peptide linker. Any suitable linker can be used, for example the peptide linker can include at least 5 amino acids, at least ten amino acids, and least 20 amino acids, at least 30 amino acids or more, and so on. In certain embodiments, the peptide linker includes least 5 amino acids, but no more than 25 amino acids. In certain embodiments the peptide linker can consist of 5 amino acids, 10 amino acids, 15 amino acids, 20 amino acids, or 25 amino acids. In certain embodiments, the peptide linker consists of GGGGS (SEQ ID NO: 9), GGGGSGGGGS (SEQ ID NO: 10), GGGGSGGGGSGGGGS (SEQ ID NO: 11), GGGGSGGGGSGGGGSGGGGS (SEQ ID NO: 12), or GGGGSGGGGSGGGGSGGGGSGGGGS (SEQ ID NO: 13).

[0239] Heterologous moieties to be attached to a J-chain can include, without limitation, a binding moiety, e.g., an antibody or antigen-binding fragment thereof, e.g., a single chain Fv (scFv) molecule, e.g., an scFv that binds pIgR or mucin, a cytokine, e.g., IL-2 or IL-15 (see, e.g., PCT Application No. PCT US2019/057702, which is incorporated herein by reference in its entirety), a stabilizing peptide that can increase the half-life of the binding molecule, e.g., human serum albumin (HSA) or an HSA binding molecule, a pIgR or mucin binding molecule, or a heterologous chemical moiety such as a polymer.

[0240] In some embodiments, a modified J-chain can comprise an antigen-binding domain that can include without limitation a polypeptide capable of specifically binding to a target antigen. In certain embodiments, an antigen-binding domain associated with a modified J-chain can be an antibody or an antigen-binding fragment thereof. In certain embodiments the antigen-binding domain can be a scFv antigen-binding domain or a single-chain antigen-binding domain derived, e.g., from a camelid or condricthoid antibody. In certain embodiments, the target is a target epitope, a target antigen, a target cell, or a target organ. In some embodiments, the antigen binding domain binds Interleukin 6 (IL6), mucin, or pIgR.

[0241] In certain embodiments, the binding domain, e.g., scFv fragment can specifically bind to human coronavirus. In certain embodiments, binding domain binds to a different epitope of the human coronavirus than the three to twelve identical binding domains of the multimeric binding molecule that specifically bind to the human coronavirus. In certain embodiments, the binding domain, e.g., scFv fragment can specifically bind to SARS-CoV-2.

[0242] In some embodiments, the SARS-CoV-2-specific binding domain, e.g., scFv fragment comprises a heavy chain variable region (VH) and a light chain variable region (VL), where the VH and VL comprise six immunoglobulin complementarity determining regions HCDR1, HCDR2, HCDR3, LCDR1, LCDR2, and LCDR3, where the HCDR1, HCDR2, HCDR3, LCDR1, LCDR2, and LCDR3 comprise the CDRs of an antibody comprising the VH and VL of SEQ ID NO: SEQ ID NO: 84 and SEQ ID NO: 85, SEQ ID NO: 86 and SEQ ID NO: 87, SEQ ID NO: 88 and SEQ ID NO: 89, SEQ ID NO: 90 and SEQ ID NO: 91, SEQ ID NO: 92 and SEQ ID NO: 93, SEQ ID NO: 94 and SEQ ID NO: 95, SEQ ID NO: 96 and SEQ ID NO: 97, SEQ ID NO: 98 and SEQ ID NO: 99, SEQ ID NO: 100 and SEQ ID NO: 101, SEQ ID NO: 102 and SEQ ID NO: 103, SEQ ID NO: 104 and SEQ ID NO: 105, SEQ ID NO: 106 and SEQ ID NO: 107, SEQ ID NO: 108 and SEQ ID NO: 109, SEQ ID NO: 110 and SEQ ID NO: 111, SEQ ID NO: 112 and SEQ ID NO: 113, SEQ ID NO: 114 and SEQ ID NO: 115, SEQ ID NO: 116 and SEQ ID NO: 117, SEQ ID NO: 118 and SEQ ID NO: 119, SEQ ID NO: 120 and SEQ ID NO: 121, SEQ ID NO: 122 and SEQ ID NO: 123, SEQ ID NO: 124 and SEQ ID NO: 125, SEQ ID NO: 126 and SEQ ID NO: 127, SEQ ID NO: 128 and SEQ ID NO: 129, SEQ ID NO: 130 and SEQ ID NO: 131, SEQ ID NO: 132 and SEQ ID NO: 133, SEQ ID NO: 134 and SEQ ID NO: 135, SEQ ID NO: 136 and SEQ ID NO: 137, SEQ ID NO: 138 and SEQ ID NO: 139, SEQ ID NO: 140 and SEQ ID NO: 141, SEQ ID NO: 142 and SEQ ID NO: 143, SEQ ID NO: 144 and SEQ ID NO: 145, SEQ ID NO: 146 and SEQ ID NO: 147, SEQ ID NO: 148 and SEQ ID NO: 149, SEQ ID NO: 150 and SEQ ID NO: 151, SEQ ID NO: 152 and SEQ ID NO: 153, SEQ ID NO: 154 and SEQ ID NO: 155, SEQ ID NO: 156 and SEQ ID NO: 157, SEQ ID NO: 158 and SEQ ID NO: 159, SEQ ID NO: 160 and SEQ ID NO: 161, SEQ ID NO: 162 and SEQ ID NO: 163, SEQ ID NO: 164 and SEQ ID NO: 165, SEQ ID NO: 166 and SEQ ID NO: 167, SEQ ID NO: 168 and SEQ ID NO: 169, SEQ ID NO: 170 and SEQ ID NO: 171, SEQ ID NO: 172 and SEQ ID NO: 173, SEQ ID NO: 174 and SEQ ID NO: 175, SEQ ID NO: 176 and SEQ ID NO: 177, SEQ ID NO: 178 and SEQ ID NO: 179, SEQ ID NO: 180 and SEQ ID NO: 181, SEQ ID NO: 182 and SEQ ID NO: 183, SEQ ID NO: 184 and SEQ ID NO: 185, SEQ ID NO: 186 and SEQ ID NO: 187, SEQ ID NO: 188 and SEQ ID NO: 189, SEQ ID NO: 190 and SEQ ID NO: 191, SEQ ID NO: 192 and SEQ ID NO: 193, SEQ ID NO: 194 and SEQ ID NO: 195, SEQ ID NO: 196 and SEQ ID NO: 197, SEQ ID NO: 198 and SEQ ID NO: 199, SEQ ID NO: 200 and SEQ ID NO: 201, SEQ ID NO: 202 and SEQ ID NO: 203, SEQ ID NO: 204 and SEQ ID NO: 205, SEQ ID NO: 206 and SEQ ID NO: 207, SEQ ID NO: 208 and SEQ ID NO: 209, SEQ ID NO: 210 and SEQ ID NO: 211, SEQ ID NO: 212 and SEQ ID NO: 213, SEQ ID NO: 214 and SEQ ID NO: 215, SEQ ID NO: 216 and SEQ ID NO: 217, SEQ ID NO: 218 and SEQ ID NO: 219, SEQ ID NO: 220 and SEQ ID NO: 221, SEQ ID NO: 222 and SEQ ID NO: 223, SEQ ID NO: 224 and SEQ ID NO: 225, SEQ ID NO: 226 and SEQ ID NO: 227, SEQ ID NO: 228 and SEQ ID NO: 229, SEQ ID NO: 230 and SEQ ID NO: 231, SEQ ID NO: 232 and SEQ ID NO: 233, SEQ ID NO: 234 and SEQ ID NO: 235, SEQ ID NO: 236 and SEQ ID NO: 237, SEQ ID NO: 238 and SEQ ID NO: 239, SEQ ID NO: 240 and SEQ ID NO: 241, SEQ ID NO: 242 and SEQ ID NO: 243, SEQ ID NO: 244 and SEQ ID NO: 245, SEQ ID NO: 246 and SEQ ID NO: 247, SEQ ID NO: 248 and SEQ ID NO: 249, SEQ ID NO: 250 and SEQ ID NO: 251, SEQ ID NO: 252 and SEQ ID NO: 253, SEQ ID NO: 254 and SEQ ID NO: 255, SEQ ID NO: 256 and SEQ ID NO: 257, SEQ ID NO: 258 and SEQ ID NO: 259, SEQ ID NO: 260 and SEQ ID NO: 261, SEQ ID NO: 264 and SEQ ID NO: 265, SEQ ID NO: 266 and SEQ ID NO: 267, SEQ ID NO: 268 and SEQ ID NO: 269, SEQ ID NO: 270 and SEQ ID NO: 271, SEQ ID NO: 272 and SEQ ID NO: 273, SEQ ID NO: 274 and SEQ ID NO: 275, SEQ ID NO: 276 and SEQ ID NO: 277, SEQ ID NO: 278 and SEQ ID NO: 279, SEQ ID NO: 280 and SEQ ID NO: 281, SEQ ID NO: 282 and SEQ ID NO: 283, SEQ ID NO: 284 and SEQ ID NO: 285, SEQ ID NO: 286 and SEQ ID NO: 287, SEQ ID NO: 288 and SEQ ID NO: 289, SEQ ID NO: 290 and SEQ ID NO: 291, SEQ ID NO: 292 and SEQ ID NO: 293, SEQ ID NO: 294 and SEQ ID NO: 295, SEQ ID NO: 296 and SEQ ID NO: 297, SEQ ID NO: 298 and SEQ ID NO: 299, SEQ ID NO: 300 and SEQ ID NO: 301, SEQ ID NO: 302 and SEQ ID NO: 303, SEQ ID NO: 304 and SEQ ID NO: 305, SEQ ID NO: 306 and SEQ ID NO: 307, SEQ ID NO: 308 and SEQ ID NO: 309, SEQ ID NO: 310 and SEQ ID NO: 311, SEQ ID NO: 312 and SEQ ID NO: 313, SEQ ID NO: 314 and SEQ ID NO: 315, SEQ ID NO: 316 and SEQ ID NO: 317, SEQ ID NO: 318 and SEQ ID NO: 319, SEQ ID NO: 320 and SEQ ID NO: 321, SEQ ID NO: 322 and SEQ ID NO: 323, SEQ ID NO: 324 and SEQ ID NO: 325, SEQ ID NO: 326 and SEQ ID NO: 327, SEQ ID NO: 328 and SEQ ID NO: 329, SEQ ID NO: 330 and SEQ ID NO: 331, SEQ ID NO: 332 and SEQ ID NO: 333, SEQ ID NO: 336 and SEQ ID NO: 337, SEQ ID NO: 338 and SEQ ID NO: 339, SEQ ID NO: 340 and SEQ ID NO: 341, SEQ ID NO: 342 and SEQ ID NO: 343, SEQ ID NO: 344 and SEQ ID NO: 345, SEQ ID NO: 348 and SEQ ID NO: 349, SEQ ID NO: 350 and SEQ ID NO: 351, SEQ ID NO: 352 and SEQ ID NO: 353, SEQ ID NO: 354 and SEQ ID NO: 355, SEQ ID NO: 356 and SEQ ID NO: 357, SEQ ID NO: 358 and SEQ ID NO: 359, SEQ ID NO: 362 and SEQ ID NO: 363, SEQ ID NO: 364 and SEQ ID NO: 365, SEQ ID NO: 366 and SEQ ID NO: 367, SEQ ID NO: 368 and SEQ ID NO: 369, SEQ ID NO: 370 and SEQ ID NO: 371, SEQ ID NO: 372 and SEQ ID NO: 373, SEQ ID NO: 374 and SEQ ID NO: 375, SEQ ID NO: 376 and SEQ ID NO: 377, SEQ ID NO: 378 and SEQ ID NO: 379, SEQ ID NO: 380 and SEQ ID NO: 381, SEQ ID NO: 382 and SEQ ID NO: 383, SEQ ID NO: 384 and SEQ ID NO: 385, SEQ ID NO: 386 and SEQ ID NO: 387, SEQ ID NO: 388 and SEQ ID NO: 389, SEQ ID NO: 390 and SEQ ID NO: 391, SEQ ID NO: 392 and SEQ ID NO: 393, SEQ ID NO: 394 and SEQ ID NO: 395, SEQ ID NO: 396 and SEQ ID NO: 397, SEQ ID NO: 398 and SEQ ID NO: 399, SEQ ID NO: 400 and SEQ ID NO: 401, SEQ ID NO: 402 and SEQ ID NO: 403, SEQ ID NO: 404 and SEQ ID NO: 405, SEQ ID NO: 406 and SEQ ID NO: 407, SEQ ID NO: 408 and SEQ ID NO: 409, SEQ ID NO: 410 and SEQ ID NO: 411, SEQ ID NO: 412 and SEQ ID NO: 413, SEQ ID NO: 414 and SEQ ID NO: 415, SEQ ID NO: 416 and SEQ ID NO: 417, SEQ ID NO: 418 and SEQ ID NO: 419, SEQ ID NO: 420 and SEQ ID NO: 421, SEQ ID NO: 422 and SEQ ID NO: 423, SEQ ID NO: 424 and SEQ ID NO: 425, SEQ ID NO: 426 and SEQ ID NO: 427, SEQ ID NO: 428 and SEQ ID NO: 429, SEQ ID NO: 430 and SEQ ID NO: 431, SEQ ID NO: 432 and SEQ ID NO: 433, SEQ ID NO: 434 and SEQ ID NO: 435, SEQ ID NO: 436 and SEQ ID NO: 437, SEQ ID NO: 438 and SEQ ID NO: 439, SEQ ID NO: 440 and SEQ ID NO: 441, SEQ ID NO: 442 and SEQ ID NO: 443, SEQ ID NO: 444 and SEQ ID NO: 445, SEQ ID NO: 446 and SEQ ID NO: 447, SEQ ID NO: 448 and SEQ ID NO: 449, SEQ ID NO: 450 and SEQ ID NO: 451, SEQ ID NO: 452 and SEQ ID NO: 453, SEQ ID NO: 454 and SEQ ID NO: 455, SEQ ID NO: 456 and SEQ ID NO: 457, SEQ ID NO: 458 and SEQ ID NO: 459, SEQ ID NO: 460 and SEQ ID NO: 461, SEQ ID NO: 462 and SEQ ID NO: 463, SEQ ID NO: 464 and SEQ ID NO: 465, SEQ ID NO: 466 and SEQ ID NO: 467, SEQ ID NO: 468 and SEQ ID NO: 469, SEQ ID NO: 470 and SEQ ID NO: 471, SEQ ID NO: 472 and SEQ ID NO: 473, SEQ ID NO: 474 and SEQ ID NO: 475, SEQ ID NO: 476 and SEQ ID NO: 477, SEQ ID NO: 478 and SEQ ID NO: 479, SEQ ID NO: 480 and SEQ ID NO: 481, SEQ ID NO: 482 and SEQ ID NO: 483, SEQ ID NO: 484 and SEQ ID NO: 485, SEQ ID NO: 486 and SEQ ID NO: 487, SEQ ID NO: 488 and SEQ ID NO: 489, SEQ ID NO: 490 and SEQ ID NO: 491, SEQ ID NO: 492 and SEQ ID NO: 493, SEQ ID NO: 494 and SEQ ID NO: 495, SEQ ID NO: 496 and SEQ ID NO: 497, SEQ ID NO: 498 and SEQ ID NO: 499, SEQ ID NO: 500 and SEQ ID NO: 501, SEQ ID NO: 502 and SEQ ID NO: 503, SEQ ID NO: 504 and SEQ ID NO: 505, SEQ ID NO: 506 and SEQ ID NO: 507, SEQ ID NO: 508 and SEQ ID NO: 509, SEQ ID NO: 628 and SEQ ID NO: 629, SEQ ID NO: 630 and SEQ ID NO: 631, SEQ ID NO: 632 and SEQ ID NO: 633, SEQ ID NO: 634 and SEQ ID NO: 635, SEQ ID NO: 636 and SEQ ID NO: 637, SEQ ID NO: 638 and SEQ ID NO: 639, SEQ ID NO: 640 and SEQ ID NO: 641, SEQ ID NO: 642 and SEQ ID NO: 643, SEQ ID NO: 644 and SEQ ID NO: 645, SEQ ID NO: 646 and SEQ ID NO: 647, SEQ ID NO: 648 and SEQ ID NO: 649, SEQ ID NO: 650 and SEQ ID NO: 651, or SEQ ID NO: 652 and SEQ ID NO: 653, respectively with zero, one, or two single amino acid substitutions in one or more of the HCDRs or LCDRs.

[0243] In some embodiments, the SARS-CoV-2-specific binding domain, e.g., scFv fragment comprises an antibody VH and a VL, where the VH and VL comprise amino acid sequences at least 80%, at least 85%, at least 90%, at least 95% or 100% identical to SEQ ID NO: 84 and SEQ ID NO: 85, SEQ ID NO: 86 and SEQ ID NO: 87, SEQ ID NO: 88 and SEQ ID NO: 89, SEQ ID NO: 90 and SEQ ID NO: 91, SEQ ID NO: 92 and SEQ ID NO: 93, SEQ ID NO: 94 and SEQ ID NO: 95, SEQ ID NO: 96 and SEQ ID NO: 97, SEQ ID NO: 98 and SEQ ID NO: 99, SEQ ID NO: 100 and SEQ ID NO: 101, SEQ ID NO: 102 and SEQ ID NO: 103, SEQ ID NO: 104 and SEQ ID NO: 105, SEQ ID NO: 106 and SEQ ID NO: 107, SEQ ID NO: 108 and SEQ ID NO: 109, SEQ ID NO: 110 and SEQ ID NO: 111, SEQ ID NO: 112 and SEQ ID NO: 113, SEQ ID NO: 114 and SEQ ID NO: 115, SEQ ID NO: 116 and SEQ ID NO: 117, SEQ ID NO: 118 and SEQ ID NO: 119, SEQ ID NO: 120 and SEQ ID NO: 121, SEQ ID NO: 122 and SEQ ID NO: 123, SEQ ID NO: 124 and SEQ ID NO: 125, SEQ ID NO: 126 and SEQ ID NO: 127, SEQ ID NO: 128 and SEQ ID NO: 129, SEQ ID NO: 130 and SEQ ID NO: 131, SEQ ID NO: 132 and SEQ ID NO: 133, SEQ ID NO: 134 and SEQ ID NO: 135, SEQ ID NO: 136 and SEQ ID NO: 137, SEQ ID NO: 138 and SEQ ID NO: 139, SEQ ID NO: 140 and SEQ ID NO: 141, SEQ ID NO: 142 and SEQ ID NO: 143, SEQ ID NO: 144 and SEQ ID NO: 145, SEQ ID NO: 146 and SEQ ID NO: 147, SEQ ID NO: 148 and SEQ ID NO: 149, SEQ ID NO: 150 and SEQ ID NO: 151, SEQ ID NO: 152 and SEQ ID NO: 153, SEQ ID NO: 154 and SEQ ID NO: 155, SEQ ID NO: 156 and SEQ ID NO: 157, SEQ ID NO: 158 and SEQ ID NO: 159, SEQ ID NO: 160 and SEQ ID NO: 161, SEQ ID NO: 162 and SEQ ID NO: 163, SEQ ID NO: 164 and SEQ ID NO: 165, SEQ ID NO: 166 and SEQ ID NO: 167, SEQ ID NO: 168 and SEQ ID NO: 169, SEQ ID NO: 170 and SEQ ID NO: 171, SEQ ID NO: 172 and SEQ ID NO: 173, SEQ ID NO: 174 and SEQ ID NO: 175, SEQ ID NO: 176 and SEQ ID NO: 177, SEQ ID NO: 178 and SEQ ID NO: 179, SEQ ID NO: 180 and SEQ ID NO: 181, SEQ ID NO: 182 and SEQ ID NO: 183, SEQ ID NO: 184 and SEQ ID NO: 185, SEQ ID NO: 186 and SEQ ID NO: 187, SEQ ID NO: 188 and SEQ ID NO: 189, SEQ ID NO: 190 and SEQ ID NO: 191, SEQ ID NO: 192 and SEQ ID NO: 193, SEQ ID NO: 194 and SEQ ID NO: 195, SEQ ID NO: 196 and SEQ ID NO: 197, SEQ ID NO: 198 and SEQ ID NO: 199, SEQ ID NO: 200 and SEQ ID NO: 201, SEQ ID NO: 202 and SEQ ID NO: 203, SEQ ID NO: 204 and SEQ ID NO: 205, SEQ ID NO: 206 and SEQ ID NO: 207, SEQ ID NO: 208 and SEQ ID NO: 209, SEQ ID NO: 210 and SEQ ID NO: 211, SEQ ID NO: 212 and SEQ ID NO: 213, SEQ ID NO: 214 and SEQ ID NO: 215, SEQ ID NO: 216 and SEQ ID NO: 217, SEQ ID NO: 218 and SEQ ID NO: 219, SEQ ID NO: 220 and SEQ ID NO: 221, SEQ ID NO: 222 and SEQ ID NO: 223, SEQ ID NO: 224 and SEQ ID NO: 225, SEQ ID NO: 226 and SEQ ID NO: 227, SEQ ID NO: 228 and SEQ ID NO: 229, SEQ ID NO: 230 and SEQ ID NO: 231, SEQ ID NO: 232 and SEQ ID NO: 233, SEQ ID NO: 234 and SEQ ID NO: 235, SEQ ID NO: 236 and SEQ ID NO: 237, SEQ ID NO: 238 and SEQ ID NO: 239, SEQ ID NO: 240 and SEQ ID NO: 241, SEQ ID NO: 242 and SEQ ID NO: 243, SEQ ID NO: 244 and SEQ ID NO: 245, SEQ ID NO: 246 and SEQ ID NO: 247, SEQ ID NO: 248 and SEQ ID NO: 249, SEQ ID NO: 250 and SEQ ID NO: 251, SEQ ID NO: 252 and SEQ ID NO: 253, SEQ ID NO: 254 and SEQ ID NO: 255, SEQ ID NO: 256 and SEQ ID NO: 257, SEQ ID NO: 258 and SEQ ID NO: 259, SEQ ID NO: 260 and SEQ ID NO: 261, SEQ ID NO: 264 and SEQ ID NO: 265, SEQ ID NO: 266 and SEQ ID NO: 267, SEQ ID NO: 268 and SEQ ID NO: 269, SEQ ID NO: 270 and SEQ ID NO: 271, SEQ ID NO: 272 and SEQ ID NO: 273, SEQ ID NO: 274 and SEQ ID NO: 275, SEQ ID NO: 276 and SEQ ID NO: 277, SEQ ID NO: 278 and SEQ ID NO: 279, SEQ ID NO: 280 and SEQ ID NO: 281, SEQ ID NO: 282 and SEQ ID NO: 283, SEQ ID NO: 284 and SEQ ID NO: 285, SEQ ID NO: 286 and SEQ ID NO: 287, SEQ ID NO: 288 and SEQ ID NO: 289, SEQ ID NO: 290 and SEQ ID NO: 291, SEQ ID NO: 292 and SEQ ID NO: 293, SEQ ID NO: 294 and SEQ ID NO: 295, SEQ ID NO: 296 and SEQ ID NO: 297, SEQ ID NO: 298 and SEQ ID NO: 299, SEQ ID NO: 300 and SEQ ID NO: 301, SEQ ID NO: 302 and SEQ ID NO: 303, SEQ ID NO: 304 and SEQ ID NO: 305, SEQ ID NO: 306 and SEQ ID NO: 307, SEQ ID NO: 308 and SEQ ID NO: 309, SEQ ID NO: 310 and SEQ ID NO: 311, SEQ ID NO: 312 and SEQ ID NO: 313, SEQ ID NO: 314 and SEQ ID NO: 315, SEQ ID NO: 316 and SEQ ID NO: 317, SEQ ID NO: 318 and SEQ ID NO: 319, SEQ ID NO: 320 and SEQ ID NO: 321, SEQ ID NO: 322 and SEQ ID NO: 323, SEQ ID NO: 324 and SEQ ID NO: 325, SEQ ID NO: 326 and SEQ ID NO: 327, SEQ ID NO: 328 and SEQ ID NO: 329, SEQ ID NO: 330 and SEQ ID NO: 331, SEQ ID NO: 332 and SEQ ID NO: 333, SEQ ID NO: 336 and SEQ ID NO: 337, SEQ ID NO: 338 and SEQ ID NO: 339, SEQ ID NO: 340 and SEQ ID NO: 341, SEQ ID NO: 342 and SEQ ID NO: 343, SEQ ID NO: 344 and SEQ ID NO: 345, SEQ ID NO: 348 and SEQ ID NO: 349, SEQ ID NO: 350 and SEQ ID NO: 351, SEQ ID NO: 352 and SEQ ID NO: 353, SEQ ID NO: 354 and SEQ ID NO: 355, SEQ ID NO: 356 and SEQ ID NO: 357, SEQ ID NO: 358 and SEQ ID NO: 359, SEQ ID NO: 362 and SEQ ID NO: 363, SEQ ID NO: 364 and SEQ ID NO: 365, SEQ ID NO: 366 and SEQ ID NO: 367, SEQ ID NO: 368 and SEQ ID NO: 369, SEQ ID NO: 370 and SEQ ID NO: 371, SEQ ID NO: 372 and SEQ ID NO: 373, SEQ ID NO: 374 and SEQ ID NO: 375, SEQ ID NO: 376 and SEQ ID NO: 377, SEQ ID NO: 378 and SEQ ID NO: 379, SEQ ID NO: 380 and SEQ ID NO: 381, SEQ ID NO: 382 and SEQ ID NO: 383, SEQ ID NO: 384 and SEQ ID NO: 385, SEQ ID NO: 386 and SEQ ID NO: 387, SEQ ID NO: 388 and SEQ ID NO: 389, SEQ ID NO: 390 and SEQ ID NO: 391, SEQ ID NO: 392 and SEQ ID NO: 393, SEQ ID NO: 394 and SEQ ID NO: 395, SEQ ID NO: 396 and SEQ ID NO: 397, SEQ ID NO: 398 and SEQ ID NO: 399, SEQ ID NO: 400 and SEQ ID NO: 401, SEQ ID NO: 402 and SEQ ID NO: 403, SEQ ID NO: 404 and SEQ ID NO: 405, SEQ ID NO: 406 and SEQ ID NO: 407, SEQ ID NO: 408 and SEQ ID NO: 409, SEQ ID NO: 410 and SEQ ID NO: 411, SEQ ID NO: 412 and SEQ ID NO: 413, SEQ ID NO: 414 and SEQ ID NO: 415, SEQ ID NO: 416 and SEQ ID NO: 417, SEQ ID NO: 418 and SEQ ID NO: 419, SEQ ID NO: 420 and SEQ ID NO: 421, SEQ ID NO: 422 and SEQ ID NO: 423, SEQ ID NO: 424 and SEQ ID NO: 425, SEQ ID NO: 426 and SEQ ID NO: 427, SEQ ID NO: 428 and SEQ ID NO: 429, SEQ ID NO: 430 and SEQ ID NO: 431, SEQ ID NO: 432 and SEQ ID NO: 433, SEQ ID NO: 434 and SEQ ID NO: 435, SEQ ID NO: 436 and SEQ ID NO: 437, SEQ ID NO: 438 and SEQ ID NO: 439, SEQ ID NO: 440 and SEQ ID NO: 441, SEQ ID NO: 442 and SEQ ID NO: 443, SEQ ID NO: 444 and SEQ ID NO: 445, SEQ ID NO: 446 and SEQ ID NO: 447, SEQ ID NO: 448 and SEQ ID NO: 449, SEQ ID NO: 450 and SEQ ID NO: 451, SEQ ID NO: 452 and SEQ ID NO: 453, SEQ ID NO: 454 and SEQ ID NO: 455, SEQ ID NO: 456 and SEQ ID NO: 457, SEQ ID NO: 458 and SEQ ID NO: 459, SEQ ID NO: 460 and SEQ ID NO: 461, SEQ ID NO: 462 and SEQ ID NO: 463, SEQ ID NO: 464 and SEQ ID NO: 465, SEQ ID NO: 466 and SEQ ID NO: 467, SEQ ID NO: 468 and SEQ ID NO: 469, SEQ ID NO: 470 and SEQ ID NO: 471, SEQ ID NO: 472 and SEQ ID NO: 473, SEQ ID NO: 474 and SEQ ID NO: 475, SEQ ID NO: 476 and SEQ ID NO: 477, SEQ ID NO: 478 and SEQ ID NO: 479, SEQ ID NO: 480 and SEQ ID NO: 481, SEQ ID NO: 482 and SEQ ID NO: 483, SEQ ID NO: 484 and SEQ ID NO: 485, SEQ ID NO: 486 and SEQ ID NO: 487, SEQ ID NO: 488 and SEQ ID NO: 489, SEQ ID NO: 490 and SEQ ID NO: 491, SEQ ID NO: 492 and SEQ ID NO: 493, SEQ ID NO: 494 and SEQ ID NO: 495, SEQ ID NO: 496 and SEQ ID NO: 497, SEQ ID NO: 498 and SEQ ID NO: 499, SEQ ID NO: 500 and SEQ ID NO: 501, SEQ ID NO: 502 and SEQ ID NO: 503, SEQ ID NO: 504 and SEQ ID NO: 505, SEQ ID NO: 506 and SEQ ID NO: 507, SEQ ID NO: 508 and SEQ ID NO: 509, SEQ ID NO: 628 and SEQ ID NO: 629, SEQ ID NO: 630 and SEQ ID NO: 631, SEQ ID NO: 632 and SEQ ID NO: 633, SEQ ID NO: 634 and SEQ ID NO: 635, SEQ ID NO: 636 and SEQ ID NO: 637, SEQ ID NO: 638 and SEQ ID NO: 639, SEQ ID NO: 640 and SEQ ID NO: 641, SEQ ID NO: 642 and SEQ ID NO: 643, SEQ ID NO: 644 and SEQ ID NO: 645, SEQ ID NO: 646 and SEQ ID NO: 647, SEQ ID NO: 648 and SEQ ID NO: 649, SEQ ID NO: 650 and SEQ ID NO: 651, or SEQ ID NO: 652 and SEQ ID NO: 653, respectively.

[0244] In certain embodiments, the binding domain, e.g., scFv fragment can specifically bind to human coronavirus. In certain embodiments, binding domain binds to a different epitope of the human coronavirus than the three to twelve identical binding domains of the multimeric binding molecule that specifically bind to the human coronavirus. In certain embodiments, the binding domain, e.g., scFv fragment can specifically bind to SARS-CoV.

[0245] In some embodiments, the SARS-CoV-specific binding domain, e.g., scFv fragment comprises a heavy chain variable region (VH) and a light chain variable region (VL), where the VH and VL comprise six immunoglobulin complementarity determining regions HCDR1, HCDR2, HCDR3, LCDR1, LCDR2, and LCDR3, where the HCDR1, HCDR2, HCDR3, LCDR1, LCDR2, and LCDR3 comprise the CDRs of an antibody comprising the VH and VL of SEQ ID NO: 84 and SEQ ID NO: 85, SEQ ID NO: 118 and SEQ ID NO: 119, SEQ ID NO: 120 and SEQ ID NO: 121, SEQ ID NO: 138 and SEQ ID NO: 139, SEQ ID NO: 162 and SEQ ID NO: 163, SEQ ID NO: 222 and SEQ ID NO: 223, SEQ ID NO: 236 and SEQ ID NO: 237, SEQ ID NO: 252 and SEQ ID NO: 253, SEQ ID NO: 260 and SEQ ID NO: 261, SEQ ID NO: 262 and SEQ ID NO: 263, SEQ ID NO: 296 and SEQ ID NO: 297, SEQ ID NO: 384 and SEQ ID NO: 385, SEQ ID NO: 628 and SEQ ID NO: 629, SEQ ID NO: 632 and SEQ ID NO: 633, SEQ ID NO: 634 and SEQ ID NO: 635, SEQ ID NO: 636 and SEQ ID NO: 637, SEQ ID NO: 638 and SEQ ID NO: 639, SEQ ID NO: 640 and SEQ ID NO: 641, SEQ ID NO: 642 and SEQ ID NO: 643, SEQ ID NO: 644 and SEQ ID NO: 645, or SEQ ID NO: 646 and SEQ ID NO: 647, respectively with zero, one, or two single amino acid substitutions in one or more of the HCDRs or LCDRs.

[0246] In some embodiments, the SARS-CoV-specific binding domain, e.g., scFv fragment comprises an antibody VH and a VL, where the VH and VL comprise amino acid sequences at least 80%, at least 85%, at least 90%, at least 95% or 100% identical to SEQ ID NO: 84 and SEQ ID NO: 85, SEQ ID NO: 118 and SEQ ID NO: 119, SEQ ID NO: 120 and SEQ ID NO: 121, SEQ ID NO: 138 and SEQ ID NO: 139, SEQ ID NO: 162 and SEQ ID NO: 163, SEQ ID NO: 222 and SEQ ID NO: 223, SEQ ID NO: 236 and SEQ ID NO: 237, SEQ ID NO: 252 and SEQ ID NO: 253, SEQ ID NO: 260 and SEQ ID NO: 261, SEQ ID NO: 262 and SEQ ID NO: 263, SEQ ID NO: 296 and SEQ ID NO: 297, SEQ ID NO: 384 and SEQ ID NO: 385, SEQ ID NO: 628 and SEQ ID NO: 629, SEQ ID NO: 632 and SEQ ID NO: 633, SEQ ID NO: 634 and SEQ ID NO: 635, SEQ ID NO: 636 and SEQ ID NO: 637, SEQ ID NO: 638 and SEQ ID NO: 639, SEQ ID NO: 640 and SEQ ID NO: 641, SEQ ID NO: 642 and SEQ ID NO: 643, SEQ ID NO: 644 and SEQ ID NO: 645, or SEQ ID NO: 646 and SEQ ID NO: 647, respectively.

[0247] In certain embodiments, the binding domain, e.g., scFv fragment can specifically bind to human coronavirus. In certain embodiments, binding domain binds to a different epitope of the human coronavirus than the three to twelve identical binding domains of the multimeric binding molecule that specifically bind to the human coronavirus. In certain embodiments, the binding domain, e.g., scFv fragment can specifically bind to MERS-CoV.

[0248] In some embodiments, the MERS-CoV-specific binding domain, e.g., scFv fragment comprises a heavy chain variable region (VH) and a light chain variable region (VL), where the VH and VL comprise six immunoglobulin complementarity determining regions HCDR1, HCDR2, HCDR3, LCDR1, LCDR2, and LCDR3, where the HCDR1, HCDR2, HCDR3, LCDR1, LCDR2, and LCDR3 comprise the CDRs of an antibody comprising the VH and VL of SEQ ID NO: 510 and SEQ ID NO: 511, SEQ ID NO: 512 and SEQ ID NO: 513, SEQ ID NO: 514 and SEQ ID NO: 515, SEQ ID NO: 516 and SEQ ID NO: 517, SEQ ID NO: 518 and SEQ ID NO: 519, SEQ ID NO: 520 and SEQ ID NO: 521, SEQ ID NO: 522 and SEQ ID NO: 523, SEQ ID NO: 524 and SEQ ID NO: 525, SEQ ID NO: 526 and SEQ ID NO: 527, SEQ ID NO: 528 and SEQ ID NO: 529, SEQ ID NO: 530 and SEQ ID NO: 531, SEQ ID NO: 532 and SEQ ID NO: 533, SEQ ID NO: 534 and SEQ ID NO: 535, SEQ ID NO: 536 and SEQ ID NO: 537, SEQ ID NO: 538 and SEQ ID NO: 539, SEQ ID NO: 540 and SEQ ID NO: 541, SEQ ID NO: 542 and SEQ ID NO: 543, SEQ ID NO: 544 and SEQ ID NO: 545, SEQ ID NO: 546 and SEQ ID NO: 547, SEQ ID NO: 548 and SEQ ID NO: 549, SEQ ID NO: 550 and SEQ ID NO: 551, SEQ ID NO: 552 and SEQ ID NO: 553, SEQ ID NO: 554 and SEQ ID NO: 555, SEQ ID NO: 556 and SEQ ID NO: 557, SEQ ID NO: 558 and SEQ ID NO: 559, SEQ ID NO: 560 and SEQ ID NO: 561, SEQ ID NO: 562 and SEQ ID NO: 563, SEQ ID NO: 564 and SEQ ID NO: 565, SEQ ID NO: 566 and SEQ ID NO: 567, SEQ ID NO: 568 and SEQ ID NO: 569, SEQ ID NO: 570 and SEQ ID NO: 571, SEQ ID NO: 572 and SEQ ID NO: 573, SEQ ID NO: 574 and SEQ ID NO: 575, SEQ ID NO: 576 and SEQ ID NO: 577, SEQ ID NO: 578 and SEQ ID NO: 579, SEQ ID NO: 580 and SEQ ID NO: 581, SEQ ID NO: 582 and SEQ ID NO: 583, SEQ ID NO: 584 and SEQ ID NO: 585, SEQ ID NO: 586 and SEQ ID NO: 587, SEQ ID NO: 588 and SEQ ID NO: 589, SEQ ID NO: 590 and SEQ ID NO: 591, SEQ ID NO: 592 and SEQ ID NO: 593, SEQ ID NO: 594 and SEQ ID NO: 595, SEQ ID NO: 596 and SEQ ID NO: 597, SEQ ID NO: 598 and SEQ ID NO: 599, SEQ ID NO: 600 and SEQ ID NO: 601, SEQ ID NO: 602 and SEQ ID NO: 603, SEQ ID NO: 604 and SEQ ID NO: 605, SEQ ID NO: 606 and SEQ ID NO: 607, SEQ ID NO: 608 and SEQ ID NO: 609, SEQ ID NO: 610 and SEQ ID NO: 611, SEQ ID NO: 612 and SEQ ID NO: 613, SEQ ID NO: 614 and SEQ ID NO: 615, SEQ ID NO: 616 and SEQ ID NO: 617, SEQ ID NO: 618 and SEQ ID NO: 619, SEQ ID NO: 620 and SEQ ID NO: 621, SEQ ID NO: 622 and SEQ ID NO: 623, SEQ ID NO: 624 and SEQ ID NO: 625, SEQ ID NO: 626 and SEQ ID NO: 627, or SEQ ID NO: 630 and SEQ ID NO: 631, respectively with zero, one, or two single amino acid substitutions in one or more of the HCDRs or LCDRs.

[0249] In some embodiments, the MERS-CoV-specific binding domain, e.g., scFv fragment comprises an antibody VH and a VL, where the VH and VL comprise amino acid sequences at least 80%, at least 85%, at least 90%, at least 95% or 100% identical to SEQ ID NO: 510 and SEQ ID NO: 511, SEQ ID NO: 512 and SEQ ID NO: 513, SEQ ID NO: 514 and SEQ ID NO: 515, SEQ ID NO: 516 and SEQ ID NO: 517, SEQ ID NO: 518 and SEQ ID NO: 519, SEQ ID NO: 520 and SEQ ID NO: 521, SEQ ID NO: 522 and SEQ ID NO: 523, SEQ ID NO: 524 and SEQ ID NO: 525, SEQ ID NO: 526 and SEQ ID NO: 527, SEQ ID NO: 528 and SEQ ID NO: 529, SEQ ID NO: 530 and SEQ ID NO: 531, SEQ ID NO: 532 and SEQ ID NO: 533, SEQ ID NO: 534 and SEQ ID NO: 535, SEQ ID NO: 536 and SEQ ID NO: 537, SEQ ID NO: 538 and SEQ ID NO: 539, SEQ ID NO: 540 and SEQ ID NO: 541, SEQ ID NO: 542 and SEQ ID NO: 543, SEQ ID NO: 544 and SEQ ID NO: 545, SEQ ID NO: 546 and SEQ ID NO: 547, SEQ ID NO: 548 and SEQ ID NO: 549, SEQ ID NO: 550 and SEQ ID NO: 551, SEQ ID NO: 552 and SEQ ID NO: 553, SEQ ID NO: 554 and SEQ ID NO: 555, SEQ ID NO: 556 and SEQ ID NO: 557, SEQ ID NO: 558 and SEQ ID NO: 559, SEQ ID NO: 560 and SEQ ID NO: 561, SEQ ID NO: 562 and SEQ ID NO: 563, SEQ ID NO: 564 and SEQ ID NO: 565, SEQ ID NO: 566 and SEQ ID NO: 567, SEQ ID NO: 568 and SEQ ID NO: 569, SEQ ID NO: 570 and SEQ ID NO: 571, SEQ ID NO: 572 and SEQ ID NO: 573, SEQ ID NO: 574 and SEQ ID NO: 575, SEQ ID NO: 576 and SEQ ID NO: 577, SEQ ID NO: 578 and SEQ ID NO: 579, SEQ ID NO: 580 and SEQ ID NO: 581, SEQ ID NO: 582 and SEQ ID NO: 583, SEQ ID NO: 584 and SEQ ID NO: 585, SEQ ID NO: 586 and SEQ ID NO: 587, SEQ ID NO: 588 and SEQ ID NO: 589, SEQ ID NO: 590 and SEQ ID NO: 591, SEQ ID NO: 592 and SEQ ID NO: 593, SEQ ID NO: 594 and SEQ ID NO: 595, SEQ ID NO: 596 and SEQ ID NO: 597, SEQ ID NO: 598 and SEQ ID NO: 599, SEQ ID NO: 600 and SEQ ID NO: 601, SEQ ID NO: 602 and SEQ ID NO: 603, SEQ ID NO: 604 and SEQ ID NO: 605, SEQ ID NO: 606 and SEQ ID NO: 607, SEQ ID NO: 608 and SEQ ID NO: 609, SEQ ID NO: 610 and SEQ ID NO: 611, SEQ ID NO: 612 and SEQ ID NO: 613, SEQ ID NO: 614 and SEQ ID NO: 615, SEQ ID NO: 616 and SEQ ID NO: 617, SEQ ID NO: 618 and SEQ ID NO: 619, SEQ ID NO: 620 and SEQ ID NO: 621, SEQ ID NO: 622 and SEQ ID NO: 623, SEQ ID NO: 624 and SEQ ID NO: 625, SEQ ID NO: 626 and SEQ ID NO: 627, or SEQ ID NO: 630 and SEQ ID NO: 631, respectively.

[0250] In some embodiments, the binding domain comprises a single domain variable region (VHH), where the VHH comprises three immunoglobulin complementarity determining regions HCDR1, HCDR2, and HCDR3, where the HCDR1, HCDR2, and HCDR3 the CDRs of an antibody comprising the VHH of SEQ ID NO: 19, SEQ ID NO: 20, SEQ ID NO: 21, SEQ ID NO: 22, SEQ ID NO: 23, SEQ ID NO: 24, SEQ ID NO: 25, SEQ ID NO: 26, SEQ ID NO: 27, SEQ ID NO: 28, SEQ ID NO: 29, SEQ ID NO: 30, SEQ ID NO: 31, SEQ ID NO: 32, SEQ ID NO: 33, SEQ ID NO: 34, SEQ ID NO: 35, SEQ ID NO: 36, SEQ ID NO: 37, SEQ ID NO: 38, SEQ ID NO: 39, SEQ ID NO: 40, SEQ ID NO: 41, SEQ ID NO: 42, SEQ ID NO: 43, SEQ ID NO: 44, SEQ ID NO: 45, SEQ ID NO: 46, SEQ ID NO: 47, SEQ ID NO: 48, SEQ ID NO: 49, SEQ ID NO: 50, SEQ ID NO: 51, SEQ ID NO: 52, SEQ ID NO: 53, SEQ ID NO: 54, SEQ ID NO: 55, SEQ ID NO: 56, SEQ ID NO: 57, SEQ ID NO: 58, SEQ ID NO: 59, SEQ ID NO: 60, SEQ ID NO: 61, SEQ ID NO: 62, SEQ ID NO: 63, SEQ ID NO: 64, SEQ ID NO: 65, SEQ ID NO: 66, SEQ ID NO: 67, SEQ ID NO: 68, SEQ ID NO: 69, SEQ ID NO: 70, SEQ ID NO: 71, SEQ ID NO: 72, SEQ ID NO: 73, SEQ ID NO: 74, SEQ ID NO: 75, SEQ ID NO: 76, SEQ ID NO: 77, SEQ ID NO: 78, SEQ ID NO: 79, SEQ ID NO: 80, SEQ ID NO: 81, SEQ ID NO: 82, or SEQ ID NO: 83, with zero, one, or two single amino acid substitutions in one or more of the HCDRs.

[0251] In some embodiments, the binding domain comprises a VHH amino acid sequence at least 80%, at least 85%, at least 90%, at least 95% or 100% identical to SEQ ID NO: 19, SEQ ID NO: 20, SEQ ID NO: 21, SEQ ID NO: 22, SEQ ID NO: 23, SEQ ID NO: 24, SEQ ID NO: 25, SEQ ID NO: 26, SEQ ID NO: 27, SEQ ID NO: 28, SEQ ID NO: 29, SEQ ID NO: 30, SEQ ID NO: 31, SEQ ID NO: 32, SEQ ID NO: 33, SEQ ID NO: 34, SEQ ID NO: 35, SEQ ID NO: 36, SEQ ID NO: 37, SEQ ID NO: 38, SEQ ID NO: 39, SEQ ID NO: 40, SEQ ID NO: 41, SEQ ID NO: 42, SEQ ID NO: 43, SEQ ID NO: 44, SEQ ID NO: 45, SEQ ID NO: 46, SEQ ID NO: 47, SEQ ID NO: 48, SEQ ID NO: 49, SEQ ID NO: 50, SEQ ID NO: 51, SEQ ID NO: 52, SEQ ID NO: 53, SEQ ID NO: 54, SEQ ID NO: 55, SEQ ID NO: 56, SEQ ID NO: 57, SEQ ID NO: 58, SEQ ID NO: 59, SEQ ID NO: 60, SEQ ID NO: 61, SEQ ID NO: 62, SEQ ID NO: 63, SEQ ID NO: 64, SEQ ID NO: 65, SEQ ID NO: 66, SEQ ID NO: 67, SEQ ID NO: 68, SEQ ID NO: 69, SEQ ID NO: 70, SEQ ID NO: 71, SEQ ID NO: 72, SEQ ID NO: 73, SEQ ID NO: 74, SEQ ID NO: 75, SEQ ID NO: 76, SEQ ID NO: 77, SEQ ID NO: 78, SEQ ID NO: 79, SEQ ID NO: 80, SEQ ID NO: 81, SEQ ID NO: 82, or SEQ ID NO: 83.

[0252] In some embodiments, the binding domain is an extracellular SARS-CoV-2 RBD-binding fragment of angiotensin-converting enzyme 2 (ACE2). In some embodiments, the binding domain is an extracellular SARS-CoV-2 RBD-binding fragment comprising amino acids 18 to 740 of SEQ ID NO: 14. In some embodiments, the binding domain comprises an amino acid sequence at least 80%, at least 85%, at least 90%, at least 95% or 100% identical to amino acids 18 to 740 of SEQ ID NO: 14.

[0253] The antigen-binding domain can be introduced into the J-chain at any location that allows the binding of the antigen-binding domain to its binding target without interfering with J-chain function or the function of an associated multimeric binding molecule, e.g., a pentameric IgM or a dimeric or tetrameric IgA antibody. Insertion locations include but are not limited to at or near the C-terminus, at or near the N-terminus or at an internal location that, based on the three-dimensional structure of the J-chain, is accessible.

Variant J-Chains that Confer Increased Serum Half-Life

[0254] In certain embodiments, the J-chain is a functional variant J-chain that includes one or more single amino acid substitutions, deletions, or insertions relative to a reference J-chain identical to the variant J-chain except for the one or more single amino acid substitutions, deletions, or insertions. For example, certain amino acid substitutions, deletions, or insertions can result in the IgM-derived binding molecule exhibiting an increased serum half-life upon administration to a subject animal relative to a reference IgM-derived binding molecule that is identical except for the one or more single amino acid substitutions, deletions, or insertions in the variant J-chain, and is administered using the same method to the same animal species. In certain embodiments the variant J-chain can include one, two, three, or four single amino acid substitutions, deletions, or insertions relative to the reference J-chain. Exemplary J-chains that confer increased serum half-life can be found, e.g., in U.S. Pat. No. 10,899,935, which is incorporated herein by reference in its entirety.

[0255] In certain embodiments, the J-chain, such as a modified J-chain, comprises an amino acid substitution at the amino acid position corresponding to amino acid Y102 of the mature wild-type human J-chain (SEQ ID NO: 7). By “an amino acid corresponding to amino acid Y102 of the mature wild-type human J-chain” is meant the amino acid in the sequence of the J-chain, which is homologous to Y102 in the human J-chain. For example, see U.S. Pat. No. 10,899,835, which is incorporated herein by reference in its entirety. The position corresponding to Y102 in SEQ ID NO: 7 is conserved in the J-chain amino acid sequences of at least 43 other species. See FIG. 4 of U.S. Pat. No. 9,951,134, which is incorporated by reference herein. Certain mutations at the position corresponding to Y102 of SEQ ID NO: 7 can inhibit the binding of IgM pentamers comprising the variant J-chain to certain immunoglobulin receptors, e.g., the human or murine Fcαμ receptor, the murine Fcμ receptor, and/or the human or murine polymeric Ig receptor (pIgR).

[0256] A multimeric binding molecule comprising a mutation at the amino acid corresponding to Y102 of SEQ ID NO: 7 has an improved serum half-life when administered to an animal than a corresponding multimeric binding molecule that is identical except for the substitution, and which is administered to the same species in the same manner. In certain embodiments, the amino acid corresponding to Y102 of SEQ ID NO: 7 can be substituted with any amino acid. In certain embodiments, the amino acid corresponding to Y102 of SEQ ID NO: 7 can be substituted with alanine (A), serine (S) or arginine (R). In a particular embodiment, the amino acid corresponding to Y102 of SEQ ID NO: 7 can be substituted with alanine. In a particular embodiment the J-chain or functional fragment or variant thereof is a variant human J-chain referred to herein as “J*,” and comprises the amino acid sequence SEQ ID NO: 8.

[0257] Wild-type J-chains typically include one N-linked glycosylation site. In certain embodiments, a variant J-chain or functional fragment thereof of a multimeric binding molecule as provided herein includes a mutation within the asparagine(N)-linked glycosylation motif N-X₁-S/T, e.g., starting at the amino acid position corresponding to amino acid 49 (motif N6) of the mature human J-chain (SEQ ID NO: 7) or J* (SEQ ID NO: 8), where N is asparagine, X₁ is any amino acid except proline, and S/T is serine or threonine, and where the mutation prevents glycosylation at that motif. As demonstrated in U.S. Pat. No. 10,899,835, mutations preventing glycosylation at this site can result in the multimeric binding molecule as provided herein, exhibiting an increased serum half-life upon administration to a subject animal relative to a reference multimeric binding molecule that is identical except for the mutation or mutations preventing glycosylation in the variant J-chain, and is administered in the same way to the same animal species.

[0258] For example, in certain embodiments the variant J-chain or functional fragment thereof of a pentameric IgM-derived or dimeric IgA-derived binding molecule as provided herein can include an amino acid substitution at the amino acid position corresponding to amino acid N49 or amino acid S51 of SEQ ID NO: 7 or SEQ ID NO: 8, provided that the amino acid corresponding to S51 is not substituted with threonine (T), or where the variant J-chain comprises amino acid substitutions at the amino acid positions corresponding to both amino acids N49 and S51 of SEQ ID NO: 7 or SEQ ID NO: 8. In certain embodiments, the position corresponding to N49 of SEQ ID NO: 7 or SEQ ID NO: 8 is substituted with any amino acid, e.g., alanine (A), glycine (G), threonine (T), serine (S) or aspartic acid (D). In a particular embodiment, the position corresponding to N49 of SEQ ID NO: 7 or SEQ ID NO: 8 can be substituted with alanine (A). In another particular embodiment, the position corresponding to N49 of SEQ ID NO: 7 or SEQ ID NO: 8 can be substituted with aspartic acid (D). In some embodiments, the position corresponding to S51 of SEQ ID NO: 7 or SEQ ID NO: 8 is substituted with alanine (A) or glycine (G). In some embodiments, the position corresponding to S51 of SEQ ID NO: 7 or SEQ ID NO: 8 is substituted with alanine (A).

### Variant IgM Constant Regions

[0259] IgM heavy chain constant regions of a multimeric binding molecule as provided herein can be engineered to confer certain desirable properties to the multimeric binding molecules provided herein. For example, in certain embodiments, IgM heavy chain constant regions can be engineered to confer enhanced serum half-life to multimeric binding molecules as provided herein. Exemplary IgM heavy chain constant region mutations that can enhance serum half-life of an IgM-derived binding molecule are disclosed in U.S. Pat. No. 10,899,835, which is incorporated by reference herein in its entirety. For example, a variant IgM heavy chain constant region of the IgM antibody, IgM-like antibody, or IgM-derived binding molecule as provided herein can include an amino acid substitution at a position corresponding to amino acid S401, E402, E403, R344, and/or E345 of a wild-type human IgM constant region (e.g., SEQ ID NO: 1 or SEQ ID NO: 2). By “an amino acid corresponding to amino acid S401, E402, E403, R344, and/or E345 of a wild-type human IgM constant region” is meant the amino acid in the sequence of the IgM constant region of any species which is homologous to 5401, E402, E403, R344, and/or E345 in the human IgM constant region. In certain embodiments, the amino acid corresponding to 5401, E402, E403, R344, and/or E345 of SEQ ID NO: 1 or SEQ ID NO: 2 can be substituted with any amino acid, e.g., alanine.

[0260] In certain embodiments, an IgM antibody, IgM-like antibody, or other IgM-derived binding molecule as provided herein, can be engineered to exhibit reduced complement-dependent cytotoxicity (CDC) activity to cells in the presence of complement, relative to a reference IgM antibody, IgM-like antibody, or other IgM-derived binding molecule with corresponding reference human IgM constant regions identical, except for the mutations conferring reduced CDC activity. These CDC mutations can be combined with any of the mutations to confer increased serum half-life as provided herein. By “corresponding reference human IgM constant region” is meant a human IgM constant region that is identical to the variant IgM constant region except for the modification or modifications in the constant region affecting CDC activity. In certain embodiments, the variant human IgM constant region includes one or more amino acid substitutions, e.g., in the Cμ3 domain, relative to a wild-type human IgM constant region as described, e.g., in U.S. Patent Application Publication No. US 2021-0147567, which is incorporated herein by reference in its entirety. Assays for measuring CDC are well known to those of ordinary skill in the art, and exemplary assays are described e.g., in U.S. Patent Application Publication No. US 2021-0147567.

[0261] In certain embodiments, a variant human IgM constant region conferring reduced CDC activity includes an amino acid substitution corresponding to the wild-type human IgM constant region at position L310, P311, P313, and/or K315 of SEQ ID NO: 1 (human IgM constant region allele IGHM*03) or SEQ ID NO: 2 (human IgM constant region allele IGHM*04). In certain embodiments, a variant human IgM constant region conferring reduced CDC activity includes an amino acid substitution corresponding to the wild-type human IgM constant region at position P311 of SEQ ID NO: 1 or SEQ ID NO: 2. In other embodiments the variant IgM constant region as provided herein contains an amino acid substitution corresponding to the wild-type human IgM constant region at position P313 of SEQ ID NO: 1 or SEQ ID NO: 2. In other embodiments the variant IgM constant region as provided herein contains a combination of substitutions corresponding to the wild-type human IgM constant region at positions P311 of SEQ ID NO: 1 or SEQ ID NO: 2 and P313 of SEQ ID NO: 1 or SEQ ID NO: 2. These proline residues can be independently substituted with any amino acid, e.g., with alanine, serine, or glycine. In certain embodiments, a variant human IgM constant region conferring reduced CDC activity includes an amino acid substitution corresponding to the wild-type human IgM constant region at position K315 of SEQ ID NO: 1 or SEQ ID NO: 2. The lysine residue can be independently substituted with any amino acid, e.g., with alanine, serine, glycine, or aspartic acid. In certain embodiments, a variant human IgM constant region conferring reduced CDC activity includes an amino acid substitution corresponding to the wild-type human IgM constant region at position K315 of SEQ ID NO: 1 or SEQ ID NO: 2 with aspartic acid.

[0262] Human and certain non-human primate IgM constant regions typically include five (5) naturally occurring asparagine (N)-linked glycosylation motifs or sites. As used herein “an N-linked glycosylation motif” comprises or consists of the amino acid sequence N-X₁-S/T, where N is asparagine, X₁ is any amino acid except proline (P), and S/T is serine (S) or threonine (T). The glycan is attached to the nitrogen atom of the asparagine residue. See, e.g., Drickamer K, Taylor M E (2006), Introduction to Glycobiology (2nd ed.). Oxford University Press, USA. N-linked glycosylation motifs occur in the human IgM heavy chain constant regions of SEQ ID NO: 1 or SEQ ID NO: 2 starting at positions 46 (“N1”), 209 (“N2”), 272 (“N3”), 279 (“N4”), and 440 (“N5”). These five motifs are conserved in non-human primate IgM heavy chain constant regions, and four of the five are conserved in the mouse IgM heavy chain constant region. Accordingly, in some embodiments, IgM heavy chain constant regions of a multimeric binding molecule as provided herein comprise 5 N-linked glycosylation motifs: N1, N2, N3, N4, and N5. In some embodiments, at least three of the N-linked glycosylation motifs (e.g., N1, N2, and N3) on each IgM heavy chain constant region are occupied by a complex glycan.

[0263] In certain embodiments, at least one, at least two, at least three, or at least four of the N-X₁-S/T motifs can include an amino acid insertion, deletion, or substitution that prevents glycosylation at that motif. In certain embodiments, the IgM-derived multimeric binding molecule can include an amino acid insertion, deletion, or substitution at motif N1, motif N2, motif N3, motif N5, or any combination of two or more, three or more, or all four of motifs N1, N2, N3, or N5, where the amino acid insertion, deletion, or substitution prevents glycosylation at that motif. In some embodiment, the IgM constant region comprises one or more substitutions relative to a wild-type human IgM constant region at positions 46, 209, 272, or 440 of SEQ ID NO: 1 (human IgM constant region allele IGHM*03) or SEQ ID NO: 2 (human IgM constant region allele IGHM*04). See, e.g., PCT Application No. PCT/US2020/047495, which is incorporated herein by reference in its entirety.

### Polynucleotides and Vectors

[0264] In certain embodiments, this disclosure provides a polynucleotide comprising a nucleic acid sequence that encodes a polypeptide subunit of a multimeric binding molecule described herein. In some embodiments, the polynucleotide encodes a polypeptide subunit comprising a heavy chain constant region and at least an antibody VH or VHH portion of the SARS-CoV-2-binding domain of the multimeric binding molecule. In some embodiments, the polynucleotide encodes a polypeptide subunit comprising the heavy chain of the multimeric binding molecule. In some embodiments, the polynucleotide encodes a polypeptide subunit comprising a human IgM constant region or fragment thereof fused to the C-terminal end of a VH or VHH comprising HCDR1, HCDR2, and HCDR3 regions comprising the CDRs contained in the VH or VHH amino acid sequences SEQ ID NO: 19, SEQ ID NO: 20, SEQ ID NO: 21, SEQ ID NO: 22, SEQ ID NO: 23, SEQ ID NO: 24, SEQ ID NO: 25, SEQ ID NO: 26, SEQ ID NO: 27, SEQ ID NO: 28, SEQ ID NO: 29, SEQ ID NO: 30, SEQ ID NO: 31, SEQ ID NO: 32, SEQ ID NO: 33, SEQ ID NO: 34, SEQ ID NO: 35, SEQ ID NO: 36, SEQ ID NO: 37, SEQ ID NO: 38, SEQ ID NO: 39, SEQ ID NO: 40, SEQ ID NO: 41, SEQ ID NO: 42, SEQ ID NO: 43, SEQ ID NO: 44, SEQ ID NO: 45, SEQ ID NO: 46, SEQ ID NO: 47, SEQ ID NO: 48, SEQ ID NO: 49, SEQ ID NO: 50, SEQ ID NO: 51, SEQ ID NO: 52, SEQ ID NO: 53, SEQ ID NO: 54, SEQ ID NO: 55, SEQ ID NO: 56, SEQ ID NO: 57, SEQ ID NO: 58, SEQ ID NO: 59, SEQ ID NO: 60, SEQ ID NO: 61, SEQ ID NO: 62, SEQ ID NO: 63, SEQ ID NO: 64, SEQ ID NO: 65, SEQ ID NO: 66, SEQ ID NO: 67, SEQ ID NO: 68, SEQ ID NO: 69, SEQ ID NO: 70, SEQ ID NO: 71, SEQ ID NO: 72, SEQ ID NO: 73, SEQ ID NO: 74, SEQ ID NO: 75, SEQ ID NO: 76, SEQ ID NO: 77, SEQ ID NO: 78, SEQ ID NO: 79, SEQ ID NO: 80, SEQ ID NO: 81, SEQ ID NO: 82, SEQ ID NO: 83, SEQ ID NO: 84, SEQ ID NO: 86, SEQ ID NO: 88, SEQ ID NO: 90, SEQ ID NO: 92, SEQ ID NO: 94, SEQ ID NO: 96, SEQ ID NO: 98, SEQ ID NO: 100, SEQ ID NO: 102, SEQ ID NO: 104, SEQ ID NO: 106, SEQ ID NO: 108, SEQ ID NO: 110, SEQ ID NO: 112, SEQ ID NO: 114, SEQ ID NO: 116, SEQ ID NO: 118, SEQ ID NO: 120, SEQ ID NO: 122, SEQ ID NO: 124, SEQ ID NO: 126, SEQ ID NO: 128, SEQ ID NO: 130, SEQ ID NO: 132, SEQ ID NO: 134, SEQ ID NO: 136, SEQ ID NO: 138, SEQ ID NO: 140, SEQ ID NO: 142, SEQ ID NO: 144, SEQ ID NO: 146, SEQ ID NO: 148, SEQ ID NO: 150, SEQ ID NO: 152, SEQ ID NO: 154, SEQ ID NO: 156, SEQ ID NO: 158, SEQ ID NO: 160, SEQ ID NO: 162, SEQ ID NO: 164, SEQ ID NO: 166, SEQ ID NO: 168, SEQ ID NO: 170, SEQ ID NO: 172, SEQ ID NO: 174, SEQ ID NO: 176, SEQ ID NO: 178, SEQ ID NO: 180, SEQ ID NO: 182, SEQ ID NO: 184, SEQ ID NO: 186, SEQ ID NO: 188, SEQ ID NO: 190, SEQ ID NO: 192, SEQ ID NO: 194, SEQ ID NO: 196, SEQ ID NO: 198, SEQ ID NO: 200, SEQ ID NO: 202, SEQ ID NO: 204, SEQ ID NO: 206, SEQ ID NO: 208, SEQ ID NO: 210, SEQ ID NO: 212, SEQ ID NO: 214, SEQ ID NO: 216, SEQ ID NO: 218, SEQ ID NO: 220, SEQ ID NO: 222, SEQ ID NO: 224, SEQ ID NO: 226, SEQ ID NO: 228, SEQ ID NO: 230, SEQ ID NO: 232, SEQ ID NO: 234, SEQ ID NO: 236, SEQ ID NO: 238, SEQ ID NO: 240, SEQ ID NO: 242, SEQ ID NO: 244, SEQ ID NO: 246, SEQ ID NO: 248, SEQ ID NO: 250, SEQ ID NO: 252, SEQ ID NO: 254, SEQ ID NO: 256, SEQ ID NO: 258, SEQ ID NO: 260, SEQ ID NO: 264, SEQ ID NO: 266, SEQ ID NO: 268, SEQ ID NO: 270, SEQ ID NO: 272, SEQ ID NO: 274, SEQ ID NO: 276, SEQ ID NO: 278, SEQ ID NO: 280, SEQ ID NO: 282, SEQ ID NO: 284, SEQ ID NO: 286, SEQ ID NO: 288, SEQ ID NO: 290, SEQ ID NO: 292, SEQ ID NO: 294, SEQ ID NO: 296, SEQ ID NO: 298, SEQ ID NO: 300, SEQ ID NO: 302, SEQ ID NO: 304, SEQ ID NO: 306, SEQ ID NO: 308, SEQ ID NO: 310, SEQ ID NO: 312, SEQ ID NO: 314, SEQ ID NO: 316, SEQ ID NO: 318, SEQ ID NO: 320, SEQ ID NO: 322, SEQ ID NO: 324, SEQ ID NO: 326, SEQ ID NO: 328, SEQ ID NO: 330, SEQ ID NO: 332, SEQ ID NO: 336, SEQ ID NO: 338, SEQ ID NO: 340, SEQ ID NO: 342, SEQ ID NO: 344, SEQ ID NO: 348, SEQ ID NO: 350, SEQ ID NO: 352, SEQ ID NO: 354, SEQ ID NO: 356, SEQ ID NO: 358, SEQ ID NO: 362, SEQ ID NO: 364, SEQ ID NO: 366, SEQ ID NO: 368, SEQ ID NO: 370, SEQ ID NO: 372, SEQ ID NO: 374, SEQ ID NO: 376, SEQ ID NO: 378, SEQ ID NO: 380, SEQ ID NO: 382, SEQ ID NO: 384, SEQ ID NO: 386, SEQ ID NO: 388, SEQ ID NO: 390, SEQ ID NO: 392, SEQ ID NO: 394, SEQ ID NO: 396, SEQ ID NO: 398, SEQ ID NO: 400, SEQ ID NO: 402, SEQ ID NO: 404, SEQ ID NO: 406, SEQ ID NO: 408, SEQ ID NO: 410, SEQ ID NO: 412, SEQ ID NO: 414, SEQ ID NO: 416, SEQ ID NO: 418, SEQ ID NO: 420, SEQ ID NO: 422, SEQ ID NO: 424, SEQ ID NO: 426, SEQ ID NO: 428, SEQ ID NO: 430, SEQ ID NO: 432, SEQ ID NO: 434, SEQ ID NO: 436, SEQ ID NO: 438, SEQ ID NO: 440, SEQ ID NO: 442, SEQ ID NO: 444, SEQ ID NO: 446, SEQ ID NO: 448, SEQ ID NO: 450, SEQ ID NO: 452, SEQ ID NO: 454, SEQ ID NO: 456, SEQ ID NO: 458, SEQ ID NO: 460, SEQ ID NO: 462, SEQ ID NO: 464, SEQ ID NO: 466, SEQ ID NO: 468, SEQ ID NO: 470, SEQ ID NO: 472, SEQ ID NO: 474, SEQ ID NO: 476, SEQ ID NO: 478, SEQ ID NO: 480, SEQ ID NO: 482, SEQ ID NO: 484, SEQ ID NO: 486, SEQ ID NO: 488, SEQ ID NO: 490, SEQ ID NO: 492, SEQ ID NO: 494, SEQ ID NO: 496, SEQ ID NO: 498, SEQ ID NO: 500, SEQ ID NO: 502, SEQ ID NO: 504, SEQ ID NO: 506, SEQ ID NO: 508, SEQ ID NO: 628, SEQ ID NO: 630, SEQ ID NO: 632, SEQ ID NO: 634, SEQ ID NO: 636, SEQ ID NO: 638, SEQ ID NO: 640, SEQ ID NO: 642, SEQ ID NO: 644, SEQ ID NO: 646, SEQ ID NO: 648, SEQ ID NO: 650, or SEQ ID NO: 652, with zero, one, or two single amino acid substitutions in one or more of the HCDRs. In some embodiments, the polynucleotide encodes a polypeptide subunit comprising a human IgM constant region or fragment thereof fused to the C-terminal end of a VH or VHH comprising an amino acid sequence at least 80%, at least 85%, at least 90%, at least 95% or 100% identical to SEQ ID NO: 19, SEQ ID NO: 20, SEQ ID NO: 21, SEQ ID NO: 22, SEQ ID NO: 23, SEQ ID NO: 24, SEQ ID NO: 25, SEQ ID NO: 26, SEQ ID NO: 27, SEQ ID NO: 28, SEQ ID NO: 29, SEQ ID NO: 30, SEQ ID NO: 31, SEQ ID NO: 32, SEQ ID NO: 33, SEQ ID NO: 34, SEQ ID NO: 35, SEQ ID NO: 36, SEQ ID NO: 37, SEQ ID NO: 38, SEQ ID NO: 39, SEQ ID NO: 40, SEQ ID NO: 41, SEQ ID NO: 42, SEQ ID NO: 43, SEQ ID NO: 44, SEQ ID NO: 45, SEQ ID NO: 46, SEQ ID NO: 47, SEQ ID NO: 48, SEQ ID NO: 49, SEQ ID NO: 50, SEQ ID NO: 51, SEQ ID NO: 52, SEQ ID NO: 53, SEQ ID NO: 54, SEQ ID NO: 55, SEQ ID NO: 56, SEQ ID NO: 57, SEQ ID NO: 58, SEQ ID NO: 59, SEQ ID NO: 60, SEQ ID NO: 61, SEQ ID NO: 62, SEQ ID NO: 63, SEQ ID NO: 64, SEQ ID NO: 65, SEQ ID NO: 66, SEQ ID NO: 67, SEQ ID NO: 68, SEQ ID NO: 69, SEQ ID NO: 70, SEQ ID NO: 71, SEQ ID NO: 72, SEQ ID NO: 73, SEQ ID NO: 74, SEQ ID NO: 75, SEQ ID NO: 76, SEQ ID NO: 77, SEQ ID NO: 78, SEQ ID NO: 79, SEQ ID NO: 80, SEQ ID NO: 81, SEQ ID NO: 82, SEQ ID NO: 83, SEQ ID NO: 84, SEQ ID NO: 86, SEQ ID NO: 88, SEQ ID NO: 90, SEQ ID NO: 92, SEQ ID NO: 94, SEQ ID NO: 96, SEQ ID NO: 98, SEQ ID NO: 100, SEQ ID NO: 102, SEQ ID NO: 104, SEQ ID NO: 106, SEQ ID NO: 108, SEQ ID NO: 110, SEQ ID NO: 112, SEQ ID NO: 114, SEQ ID NO: 116, SEQ ID NO: 118, SEQ ID NO: 120, SEQ ID NO: 122, SEQ ID NO: 124, SEQ ID NO: 126, SEQ ID NO: 128, SEQ ID NO: 130, SEQ ID NO: 132, SEQ ID NO: 134, SEQ ID NO: 136, SEQ ID NO: 138, SEQ ID NO: 140, SEQ ID NO: 142, SEQ ID NO: 144, SEQ ID NO: 146, SEQ ID NO: 148, SEQ ID NO: 150, SEQ ID NO: 152, SEQ ID NO: 154, SEQ ID NO: 156, SEQ ID NO: 158, SEQ ID NO: 160, SEQ ID NO: 162, SEQ ID NO: 164, SEQ ID NO: 166, SEQ ID NO: 168, SEQ ID NO: 170, SEQ ID NO: 172, SEQ ID NO: 174, SEQ ID NO: 176, SEQ ID NO: 178, SEQ ID NO: 180, SEQ ID NO: 182, SEQ ID NO: 184, SEQ ID NO: 186, SEQ ID NO: 188, SEQ ID NO: 190, SEQ ID NO: 192, SEQ ID NO: 194, SEQ ID NO: 196, SEQ ID NO: 198, SEQ ID NO: 200, SEQ ID NO: 202, SEQ ID NO: 204, SEQ ID NO: 206, SEQ ID NO: 208, SEQ ID NO: 210, SEQ ID NO: 212, SEQ ID NO: 214, SEQ ID NO: 216, SEQ ID NO: 218, SEQ ID NO: 220, SEQ ID NO: 222, SEQ ID NO: 224, SEQ ID NO: 226, SEQ ID NO: 228, SEQ ID NO: 230, SEQ ID NO: 232, SEQ ID NO: 234, SEQ ID NO: 236, SEQ ID NO: 238, SEQ ID NO: 240, SEQ ID NO: 242, SEQ ID NO: 244, SEQ ID NO: 246, SEQ ID NO: 248, SEQ ID NO: 250, SEQ ID NO: 252, SEQ ID NO: 254, SEQ ID NO: 256, SEQ ID NO: 258, SEQ ID NO: 260, SEQ ID NO: 264, SEQ ID NO: 266, SEQ ID NO: 268, SEQ ID NO: 270, SEQ ID NO: 272, SEQ ID NO: 274, SEQ ID NO: 276, SEQ ID NO: 278, SEQ ID NO: 280, SEQ ID NO: 282, SEQ ID NO: 284, SEQ ID NO: 286, SEQ ID NO: 288, SEQ ID NO: 290, SEQ ID NO: 292, SEQ ID NO: 294, SEQ ID NO: 296, SEQ ID NO: 298, SEQ ID NO: 300, SEQ ID NO: 302, SEQ ID NO: 304, SEQ ID NO: 306, SEQ ID NO: 308, SEQ ID NO: 310, SEQ ID NO: 312, SEQ ID NO: 314, SEQ ID NO: 316, SEQ ID NO: 318, SEQ ID NO: 320, SEQ ID NO: 322, SEQ ID NO: 324, SEQ ID NO: 326, SEQ ID NO: 328, SEQ ID NO: 330, SEQ ID NO: 332, SEQ ID NO: 336, SEQ ID NO: 338, SEQ ID NO: 340, SEQ ID NO: 342, SEQ ID NO: 344, SEQ ID NO: 348, SEQ ID NO: 350, SEQ ID NO: 352, SEQ ID NO: 354, SEQ ID NO: 356, SEQ ID NO: 358, SEQ ID NO: 362, SEQ ID NO: 364, SEQ ID NO: 366, SEQ ID NO: 368, SEQ ID NO: 370, SEQ ID NO: 372, SEQ ID NO: 374, SEQ ID NO: 376, SEQ ID NO: 378, SEQ ID NO: 380, SEQ ID NO: 382, SEQ ID NO: 384, SEQ ID NO: 386, SEQ ID NO: 388, SEQ ID NO: 390, SEQ ID NO: 392, SEQ ID NO: 394, SEQ ID NO: 396, SEQ ID NO: 398, SEQ ID NO: 400, SEQ ID NO: 402, SEQ ID NO: 404, SEQ ID NO: 406, SEQ ID NO: 408, SEQ ID NO: 410, SEQ ID NO: 412, SEQ ID NO: 414, SEQ ID NO: 416, SEQ ID NO: 418, SEQ ID NO: 420, SEQ ID NO: 422, SEQ ID NO: 424, SEQ ID NO: 426, SEQ ID NO: 428, SEQ ID NO: 430, SEQ ID NO: 432, SEQ ID NO: 434, SEQ ID NO: 436, SEQ ID NO: 438, SEQ ID NO: 440, SEQ ID NO: 442, SEQ ID NO: 444, SEQ ID NO: 446, SEQ ID NO: 448, SEQ ID NO: 450, SEQ ID NO: 452, SEQ ID NO: 454, SEQ ID NO: 456, SEQ ID NO: 458, SEQ ID NO: 460, SEQ ID NO: 462, SEQ ID NO: 464, SEQ ID NO: 466, SEQ ID NO: 468, SEQ ID NO: 470, SEQ ID NO: 472, SEQ ID NO: 474, SEQ ID NO: 476, SEQ ID NO: 478, SEQ ID NO: 480, SEQ ID NO: 482, SEQ ID NO: 484, SEQ ID NO: 486, SEQ ID NO: 488, SEQ ID NO: 490, SEQ ID NO: 492, SEQ ID NO: 494, SEQ ID NO: 496, SEQ ID NO: 498, SEQ ID NO: 500, SEQ ID NO: 502, SEQ ID NO: 504, SEQ ID NO: 506, SEQ ID NO: 508, SEQ ID NO: 628, SEQ ID NO: 630, SEQ ID NO: 632, SEQ ID NO: 634, SEQ ID NO: 636, SEQ ID NO: 638, SEQ ID NO: 640, SEQ ID NO: 642, SEQ ID NO: 644, SEQ ID NO: 646, SEQ ID NO: 648, SEQ ID NO: 650, or SEQ ID NO: 652.

[0265] In certain embodiments, this disclosure provides a polynucleotide comprising a nucleic acid sequence that encodes a polypeptide subunit of a multimeric binding molecule described herein. In some embodiments, the polynucleotide encodes a polypeptide subunit comprising a heavy chain constant region and at least an antibody VH portion of the SARS-CoV-binding domain of the multimeric binding molecule. In some embodiments, the polynucleotide encodes a polypeptide subunit comprising the heavy chain of the multimeric binding molecule. In some embodiments, the polynucleotide encodes a polypeptide subunit comprising a human IgM constant region or fragment thereof fused to the C-terminal end of a VH comprising HCDR1, HCDR2, and HCDR3 regions comprising the CDRs contained in the VH amino acid sequences SEQ ID NO: 84, SEQ ID NO: 118, SEQ ID NO: 120, SEQ ID NO: 138, SEQ ID NO: 162, SEQ ID NO: 222, SEQ ID NO: 236, SEQ ID NO: 252, SEQ ID NO: 260, SEQ ID NO: 262, SEQ ID NO: 296, SEQ ID NO: 384, SEQ ID NO: 628, SEQ ID NO: 632, SEQ ID NO: 634, SEQ ID NO: 636, SEQ ID NO: 638, SEQ ID NO: 640, SEQ ID NO: 642, SEQ ID NO: 644, or SEQ ID NO: 646, with zero, one, or two single amino acid substitutions in one or more of the HCDRs. In some embodiments, the polynucleotide encodes a polypeptide subunit comprising a human IgM constant region or fragment thereof fused to the C-terminal end of a VH comprising an amino acid sequence at least 80%, at least 85%, at least 90%, at least 95% or 100% identical to SEQ ID NO: 84, SEQ ID NO: 118, SEQ ID NO: 120, SEQ ID NO: 138, SEQ ID NO: 162, SEQ ID NO: 222, SEQ ID NO: 236, SEQ ID NO: 252, SEQ ID NO: 260, SEQ ID NO: 262, SEQ ID NO: 296, SEQ ID NO: 384, SEQ ID NO: 628, SEQ ID NO: 632, SEQ ID NO: 634, SEQ ID NO: 636, SEQ ID NO: 638, SEQ ID NO: 640, SEQ ID NO: 642, SEQ ID NO: 644, or SEQ ID NO: 646.

[0266] In certain embodiments, this disclosure provides a polynucleotide comprising a nucleic acid sequence that encodes a polypeptide subunit of a multimeric binding molecule described herein. In some embodiments, the polynucleotide encodes a polypeptide subunit comprising a heavy chain constant region and at least an antibody VH portion of the MERS-CoV-binding domain of the multimeric binding molecule. In some embodiments, the polynucleotide encodes a polypeptide subunit comprising the heavy chain of the multimeric binding molecule. In some embodiments, the polynucleotide encodes a polypeptide subunit comprising a human IgM constant region or fragment thereof fused to the C-terminal end of a VH comprising HCDR1, HCDR2, and HCDR3 regions comprising the CDRs contained in the VH amino acid sequence SEQ ID NO: 510, SEQ ID NO: 512, SEQ ID NO: 514, SEQ ID NO: 516, SEQ ID NO: 518, SEQ ID NO: 520, SEQ ID NO: 522, SEQ ID NO: 524, SEQ ID NO: 526, SEQ ID NO: 528, SEQ ID NO: 530, SEQ ID NO: 532, SEQ ID NO: 534, SEQ ID NO: 536, SEQ ID NO: 538, SEQ ID NO: 540, SEQ ID NO: 542, SEQ ID NO: 544, SEQ ID NO: 546, SEQ ID NO: 548, SEQ ID NO: 550, SEQ ID NO: 552, SEQ ID NO: 554, SEQ ID NO: 556, SEQ ID NO: 558, SEQ ID NO: 560, SEQ ID NO: 562, SEQ ID NO: 564, SEQ ID NO: 566, SEQ ID NO: 568, SEQ ID NO: 570, SEQ ID NO: 572, SEQ ID NO: 574, SEQ ID NO: 576, SEQ ID NO: 578, SEQ ID NO: 580, SEQ ID NO: 582, SEQ ID NO: 584, SEQ ID NO: 586, SEQ ID NO: 588, SEQ ID NO: 590, SEQ ID NO: 592, SEQ ID NO: 594, SEQ ID NO: 596, SEQ ID NO: 598, SEQ ID NO: 600, SEQ ID NO: 602, SEQ ID NO: 604, SEQ ID NO: 606, SEQ ID NO: 608, SEQ ID NO: 610, SEQ ID NO: 612, SEQ ID NO: 614, SEQ ID NO: 616, SEQ ID NO: 618, SEQ ID NO: 620, SEQ ID NO: 622, SEQ ID NO: 624, SEQ ID NO: 626, or SEQ ID NO: 630, with zero, one, or two single amino acid substitutions in one or more of the HCDRs. In some embodiments, the polynucleotide encodes a polypeptide subunit comprising a human IgM constant region or fragment thereof fused to the C-terminal end of a VH comprising an amino acid sequence at least 80%, at least 85%, at least 90%, at least 95% or 100% identical to SEQ ID NO: 510, SEQ ID NO: 512, SEQ ID NO: 514, SEQ ID NO: 516, SEQ ID NO: 518, SEQ ID NO: 520, SEQ ID NO: 522, SEQ ID NO: 524, SEQ ID NO: 526, SEQ ID NO: 528, SEQ ID NO: 530, SEQ ID NO: 532, SEQ ID NO: 534, SEQ ID NO: 536, SEQ ID NO: 538, SEQ ID NO: 540, SEQ ID NO: 542, SEQ ID NO: 544, SEQ ID NO: 546, SEQ ID NO: 548, SEQ ID NO: 550, SEQ ID NO: 552, SEQ ID NO: 554, SEQ ID NO: 556, SEQ ID NO: 558, SEQ ID NO: 560, SEQ ID NO: 562, SEQ ID NO: 564, SEQ ID NO: 566, SEQ ID NO: 568, SEQ ID NO: 570, SEQ ID NO: 572, SEQ ID NO: 574, SEQ ID NO: 576, SEQ ID NO: 578, SEQ ID NO: 580, SEQ ID NO: 582, SEQ ID NO: 584, SEQ ID NO: 586, SEQ ID NO: 588, SEQ ID NO: 590, SEQ ID NO: 592, SEQ ID NO: 594, SEQ ID NO: 596, SEQ ID NO: 598, SEQ ID NO: 600, SEQ ID NO: 602, SEQ ID NO: 604, SEQ ID NO: 606, SEQ ID NO: 608, SEQ ID NO: 610, SEQ ID NO: 612, SEQ ID NO: 614, SEQ ID NO: 616, SEQ ID NO: 618, SEQ ID NO: 620, SEQ ID NO: 622, SEQ ID NO: 624, SEQ ID NO: 626, or SEQ ID NO: 630.

[0267] In some embodiments, the polynucleotide encodes a polypeptide subunit comprising a light chain constant region and an antibody VL portion of the SARS-CoV-2-binding domain of the multimeric binding molecule. In some embodiments, the polynucleotide encodes a polypeptide subunit comprising the light chain of the multimeric binding molecule. In some embodiments, the polynucleotide encodes a polypeptide subunit comprises a human kappa or lambda light chain constant region or fragment thereof fused to the C-terminal end of a VL comprising LCDR1, LCDR2, and LCDR3 regions comprising the CDRs contained in the VL amino acid sequences SEQ ID NO: 85, SEQ ID NO: 87, SEQ ID NO: 89, SEQ ID NO: 91, SEQ ID NO: 93, SEQ ID NO: 95, SEQ ID NO: 97, SEQ ID NO: 99, SEQ ID NO: 101, SEQ ID NO: 103, SEQ ID NO: 105, SEQ ID NO: 107, SEQ ID NO: 109, SEQ ID NO: 111, SEQ ID NO: 113, SEQ ID NO: 115, SEQ ID NO: 117, SEQ ID NO: 119, SEQ ID NO: 121, SEQ ID NO: 123, SEQ ID NO: 125, SEQ ID NO: 127, SEQ ID NO: 129, SEQ ID NO: 131, SEQ ID NO: 133, SEQ ID NO: 135, SEQ ID NO: 137, SEQ ID NO: 139, SEQ ID NO: 141, SEQ ID NO: 143, SEQ ID NO: 145, SEQ ID NO: 147, SEQ ID NO: 149, SEQ ID NO: 151, SEQ ID NO: 153, SEQ ID NO: 155, SEQ ID NO: 157, SEQ ID NO: 159, SEQ ID NO: 161, SEQ ID NO: 163, SEQ ID NO: 165, SEQ ID NO: 167, SEQ ID NO: 169, SEQ ID NO: 171, SEQ ID NO: 173, SEQ ID NO: 175, SEQ ID NO: 177, SEQ ID NO: 179, SEQ ID NO: 181, SEQ ID NO: 183, SEQ ID NO: 185, SEQ ID NO: 187, SEQ ID NO: 189, SEQ ID NO: 191, SEQ ID NO: 193, SEQ ID NO: 195, SEQ ID NO: 197, SEQ ID NO: 199, SEQ ID NO: 201, SEQ ID NO: 203, SEQ ID NO: 205, SEQ ID NO: 207, SEQ ID NO: 209, SEQ ID NO: 211, SEQ ID NO: 213, SEQ ID NO: 215, SEQ ID NO: 217, SEQ ID NO: 219, SEQ ID NO: 221, SEQ ID NO: 223, SEQ ID NO: 225, SEQ ID NO: 227, SEQ ID NO: 229, SEQ ID NO: 231, SEQ ID NO: 233, SEQ ID NO: 235, SEQ ID NO: 237, SEQ ID NO: 239, SEQ ID NO: 241, SEQ ID NO: 243, SEQ ID NO: 245, SEQ ID NO: 247, SEQ ID NO: 249, SEQ ID NO: 251, SEQ ID NO: 253, SEQ ID NO: 255, SEQ ID NO: 257, SEQ ID NO: 259, SEQ ID NO: 261, SEQ ID NO: 265, SEQ ID NO: 267, SEQ ID NO: 269, SEQ ID NO: 271, SEQ ID NO: 273, SEQ ID NO: 275, SEQ ID NO: 277, SEQ ID NO: 279, SEQ ID NO: 281, SEQ ID NO: 283, SEQ ID NO: 285, SEQ ID NO: 287, SEQ ID NO: 289, SEQ ID NO: 291, SEQ ID NO: 293, SEQ ID NO: 295, SEQ ID NO: 297, SEQ ID NO: 299, SEQ ID NO: 301, SEQ ID NO: 303, SEQ ID NO: 305, SEQ ID NO: 307, SEQ ID NO: 309, SEQ ID NO: 311, SEQ ID NO: 313, SEQ ID NO: 315, SEQ ID NO: 317, SEQ ID NO: 319, SEQ ID NO: 321, SEQ ID NO: 323, SEQ ID NO: 325, SEQ ID NO: 327, SEQ ID NO: 329, SEQ ID NO: 331, SEQ ID NO: 333, SEQ ID NO: 337, SEQ ID NO: 339, SEQ ID NO: 341, SEQ ID NO: 343, SEQ ID NO: 345, SEQ ID NO: 349, SEQ ID NO: 351, SEQ ID NO: 353, SEQ ID NO: 355, SEQ ID NO: 357, SEQ ID NO: 359, SEQ ID NO: 363, SEQ ID NO: 365, SEQ ID NO: 367, SEQ ID NO: 369, SEQ ID NO: 371, SEQ ID NO: 373, SEQ ID NO: 375, SEQ ID NO: 377, SEQ ID NO: 379, SEQ ID NO: 381, SEQ ID NO: 383, SEQ ID NO: 385, SEQ ID NO: 387, SEQ ID NO: 389, SEQ ID NO: 391, SEQ ID NO: 393, SEQ ID NO: 395, SEQ ID NO: 397, SEQ ID NO: 399, SEQ ID NO: 401, SEQ ID NO: 403, SEQ ID NO: 405, SEQ ID NO: 407, SEQ ID NO: 409, SEQ ID NO: 411, SEQ ID NO: 413, SEQ ID NO: 415, SEQ ID NO: 417, SEQ ID NO: 419, SEQ ID NO: 421, SEQ ID NO: 423, SEQ ID NO: 425, SEQ ID NO: 427, SEQ ID NO: 429, SEQ ID NO: 431, SEQ ID NO: 433, SEQ ID NO: 435, SEQ ID NO: 437, SEQ ID NO: 439, SEQ ID NO: 441, SEQ ID NO: 443, SEQ ID NO: 445, SEQ ID NO: 447, SEQ ID NO: 449, SEQ ID NO: 451, SEQ ID NO: 453, SEQ ID NO: 455, SEQ ID NO: 457, SEQ ID NO: 459, SEQ ID NO: 461, SEQ ID NO: 463, SEQ ID NO: 465, SEQ ID NO: 467, SEQ ID NO: 469, SEQ ID NO: 471, SEQ ID NO: 473, SEQ ID NO: 475, SEQ ID NO: 477, SEQ ID NO: 479, SEQ ID NO: 481, SEQ ID NO: 483, SEQ ID NO: 485, SEQ ID NO: 487, SEQ ID NO: 489, SEQ ID NO: 491, SEQ ID NO: 493, SEQ ID NO: 495, SEQ ID NO: 497, SEQ ID NO: 499, SEQ ID NO: 501, SEQ ID NO: 503, SEQ ID NO: 505, SEQ ID NO: 507, SEQ ID NO: 509, SEQ ID NO: 629, SEQ ID NO: 631, SEQ ID NO: 633, SEQ ID NO: 635, SEQ ID NO: 637, SEQ ID NO: 639, SEQ ID NO: 641, SEQ ID NO: 643, SEQ ID NO: 645, SEQ ID NO: 647, SEQ ID NO: 649, SEQ ID NO: 651, or SEQ ID NO: 653, with zero, one, or two single amino acid substitutions in one or more of the LCDRs. In some embodiments, the polynucleotide encodes a polypeptide subunit comprises a human kappa or lambda light chain constant region or fragment thereof fused to the C-terminal end of a VL comprising an amino acid sequence at least 80%, at least 85%, at least 90%, at least 95% or 100% identical to SEQ ID NO: 85, SEQ ID NO: 87, SEQ ID NO: 89, SEQ ID NO: 91, SEQ ID NO: 93, SEQ ID NO: 95, SEQ ID NO: 97, SEQ ID NO: 99, SEQ ID NO: 101, SEQ ID NO: 103, SEQ ID NO: 105, SEQ ID NO: 107, SEQ ID NO: 109, SEQ ID NO: 111, SEQ ID NO: 113, SEQ ID NO: 115, SEQ ID NO: 117, SEQ ID NO: 119, SEQ ID NO: 121, SEQ ID NO: 123, SEQ ID NO: 125, SEQ ID NO: 127, SEQ ID NO: 129, SEQ ID NO: 131, SEQ ID NO: 133, SEQ ID NO: 135, SEQ ID NO: 137, SEQ ID NO: 139, SEQ ID NO: 141, SEQ ID NO: 143, SEQ ID NO: 145, SEQ ID NO: 147, SEQ ID NO: 149, SEQ ID NO: 151, SEQ ID NO: 153, SEQ ID NO: 155, SEQ ID NO: 157, SEQ ID NO: 159, SEQ ID NO: 161, SEQ ID NO: 163, SEQ ID NO: 165, SEQ ID NO: 167, SEQ ID NO: 169, SEQ ID NO: 171, SEQ ID NO: 173, SEQ ID NO: 175, SEQ ID NO: 177, SEQ ID NO: 179, SEQ ID NO: 181, SEQ ID NO: 183, SEQ ID NO: 185, SEQ ID NO: 187, SEQ ID NO: 189, SEQ ID NO: 191, SEQ ID NO: 193, SEQ ID NO: 195, SEQ ID NO: 197, SEQ ID NO: 199, SEQ ID NO: 201, SEQ ID NO: 203, SEQ ID NO: 205, SEQ ID NO: 207, SEQ ID NO: 209, SEQ ID NO: 211, SEQ ID NO: 213, SEQ ID NO: 215, SEQ ID NO: 217, SEQ ID NO: 219, SEQ ID NO: 221, SEQ ID NO: 223, SEQ ID NO: 225, SEQ ID NO: 227, SEQ ID NO: 229, SEQ ID NO: 231, SEQ ID NO: 233, SEQ ID NO: 235, SEQ ID NO: 237, SEQ ID NO: 239, SEQ ID NO: 241, SEQ ID NO: 243, SEQ ID NO: 245, SEQ ID NO: 247, SEQ ID NO: 249, SEQ ID NO: 251, SEQ ID NO: 253, SEQ ID NO: 255, SEQ ID NO: 257, SEQ ID NO: 259, SEQ ID NO: 261, SEQ ID NO: 265, SEQ ID NO: 267, SEQ ID NO: 269, SEQ ID NO: 271, SEQ ID NO: 273, SEQ ID NO: 275, SEQ ID NO: 277, SEQ ID NO: 279, SEQ ID NO: 281, SEQ ID NO: 283, SEQ ID NO: 285, SEQ ID NO: 287, SEQ ID NO: 289, SEQ ID NO: 291, SEQ ID NO: 293, SEQ ID NO: 295, SEQ ID NO: 297, SEQ ID NO: 299, SEQ ID NO: 301, SEQ ID NO: 303, SEQ ID NO: 305, SEQ ID NO: 307, SEQ ID NO: 309, SEQ ID NO: 311, SEQ ID NO: 313, SEQ ID NO: 315, SEQ ID NO: 317, SEQ ID NO: 319, SEQ ID NO: 321, SEQ ID NO: 323, SEQ ID NO: 325, SEQ ID NO: 327, SEQ ID NO: 329, SEQ ID NO: 331, SEQ ID NO: 333, SEQ ID NO: 337, SEQ ID NO: 339, SEQ ID NO: 341, SEQ ID NO: 343, SEQ ID NO: 345, SEQ ID NO: 349, SEQ ID NO: 351, SEQ ID NO: 353, SEQ ID NO: 355, SEQ ID NO: 357, SEQ ID NO: 359, SEQ ID NO: 363, SEQ ID NO: 365, SEQ ID NO: 367, SEQ ID NO: 369, SEQ ID NO: 371, SEQ ID NO: 373, SEQ ID NO: 375, SEQ ID NO: 377, SEQ ID NO: 379, SEQ ID NO: 381, SEQ ID NO: 383, SEQ ID NO: 385, SEQ ID NO: 387, SEQ ID NO: 389, SEQ ID NO: 391, SEQ ID NO: 393, SEQ ID NO: 395, SEQ ID NO: 397, SEQ ID NO: 399, SEQ ID NO: 401, SEQ ID NO: 403, SEQ ID NO: 405, SEQ ID NO: 407, SEQ ID NO: 409, SEQ ID NO: 411, SEQ ID NO: 413, SEQ ID NO: 415, SEQ ID NO: 417, SEQ ID NO: 419, SEQ ID NO: 421, SEQ ID NO: 423, SEQ ID NO: 425, SEQ ID NO: 427, SEQ ID NO: 429, SEQ ID NO: 431, SEQ ID NO: 433, SEQ ID NO: 435, SEQ ID NO: 437, SEQ ID NO: 439, SEQ ID NO: 441, SEQ ID NO: 443, SEQ ID NO: 445, SEQ ID NO: 447, SEQ ID NO: 449, SEQ ID NO: 451, SEQ ID NO: 453, SEQ ID NO: 455, SEQ ID NO: 457, SEQ ID NO: 459, SEQ ID NO: 461, SEQ ID NO: 463, SEQ ID NO: 465, SEQ ID NO: 467, SEQ ID NO: 469, SEQ ID NO: 471, SEQ ID NO: 473, SEQ ID NO: 475, SEQ ID NO: 477, SEQ ID NO: 479, SEQ ID NO: 481, SEQ ID NO: 483, SEQ ID NO: 485, SEQ ID NO: 487, SEQ ID NO: 489, SEQ ID NO: 491, SEQ ID NO: 493, SEQ ID NO: 495, SEQ ID NO: 497, SEQ ID NO: 499, SEQ ID NO: 501, SEQ ID NO: 503, SEQ ID NO: 505, SEQ ID NO: 507, SEQ ID NO: 509, SEQ ID NO: 629, SEQ ID NO: 631, SEQ ID NO: 633, SEQ ID NO: 635, SEQ ID NO: 637, SEQ ID NO: 639, SEQ ID NO: 641, SEQ ID NO: 643, SEQ ID NO: 645, SEQ ID NO: 647, SEQ ID NO: 649, SEQ ID NO: 651, or SEQ ID NO: 653.

[0268] In some embodiments, the polynucleotide encodes a polypeptide subunit comprising a light chain constant region and an antibody VL portion of the SARS-CoV-binding domain of the multimeric binding molecule. In some embodiments, the polynucleotide encodes a polypeptide subunit comprising the light chain of the multimeric binding molecule. In some embodiments, the polynucleotide encodes a polypeptide subunit comprises a human kappa or lambda light chain constant region or fragment thereof fused to the C-terminal end of a VL comprising LCDR1, LCDR2, and LCDR3 regions comprising the CDRs contained in the VL amino acid sequences SEQ ID NO: 85, SEQ ID NO: 119, SEQ ID NO: 121, SEQ ID NO: 139, SEQ ID NO: 163, SEQ ID NO: 223, SEQ ID NO: 237, SEQ ID NO: 253, SEQ ID NO: 261, SEQ ID NO: 263, SEQ ID NO: 297, SEQ ID NO: 345, SEQ ID NO: 629, SEQ ID NO: 633, SEQ ID NO: 635, SEQ ID NO: 637, SEQ ID NO: 639, SEQ ID NO: 641, SEQ ID NO: 643, SEQ ID NO: 645, or SEQ ID NO: 647, with zero, one, or two single amino acid substitutions in one or more of the LCDRs. In some embodiments, the polynucleotide encodes a polypeptide subunit comprises a human kappa or lambda light chain constant region or fragment thereof fused to the C-terminal end of a VL comprising an amino acid sequence at least 80%, at least 85%, at least 90%, at least 95% or 100% identical to SEQ ID NO: 85, SEQ ID NO: 119, SEQ ID NO: 121, SEQ ID NO: 139, SEQ ID NO: 163, SEQ ID NO: 223, SEQ ID NO: 237, SEQ ID NO: 253, SEQ ID NO: 261, SEQ ID NO: 263, SEQ ID NO: 297, SEQ ID NO: 345, SEQ ID NO: 629, SEQ ID NO: 633, SEQ ID NO: 635, SEQ ID NO: 637, SEQ ID NO: 639, SEQ ID NO: 641, SEQ ID NO: 643, SEQ ID NO: 645, or SEQ ID NO: 647.

[0269] In some embodiments, the polynucleotide encodes a polypeptide subunit comprising a light chain constant region and an antibody VL portion of the MERS-CoV-binding domain of the multimeric binding molecule. In some embodiments, the polynucleotide encodes a polypeptide subunit comprising the light chain of the multimeric binding molecule. In some embodiments, the polynucleotide encodes a polypeptide subunit comprises a human kappa or lambda light chain constant region or fragment thereof fused to the C-terminal end of a VL comprising LCDR1, LCDR2, and LCDR3 regions comprising the CDRs contained in the VL amino acid sequences SEQ ID NO: 511, SEQ ID NO: 513, SEQ ID NO: 515, SEQ ID NO: 517, SEQ ID NO: 519, SEQ ID NO: 521, SEQ ID NO: 523, SEQ ID NO: 525, SEQ ID NO: 527, SEQ ID NO: 529, SEQ ID NO: 531, SEQ ID NO: 533, SEQ ID NO: 535, SEQ ID NO: 537, SEQ ID NO: 539, SEQ ID NO: 541, SEQ ID NO: 543, SEQ ID NO: 545, SEQ ID NO: 547, SEQ ID NO: 549, SEQ ID NO: 551, SEQ ID NO: 553, SEQ ID NO: 555, SEQ ID NO: 557, SEQ ID NO: 559, SEQ ID NO: 561, SEQ ID NO: 563, SEQ ID NO: 565, SEQ ID NO: 567, SEQ ID NO: 569, SEQ ID NO: 571, SEQ ID NO: 573, SEQ ID NO: 575, SEQ ID NO: 577, SEQ ID NO: 579, SEQ ID NO: 581, SEQ ID NO: 583, SEQ ID NO: 585, SEQ ID NO: 587, SEQ ID NO: 589, SEQ ID NO: 591, SEQ ID NO: 593, SEQ ID NO: 595, SEQ ID NO: 597, SEQ ID NO: 599, SEQ ID NO: 601, SEQ ID NO: 603, SEQ ID NO: 605, SEQ ID NO: 607, SEQ ID NO: 609, SEQ ID NO: 611, SEQ ID NO: 613, SEQ ID NO: 615, SEQ ID NO: 617, SEQ ID NO: 619, SEQ ID NO: 621, SEQ ID NO: 623, SEQ ID NO: 625, SEQ ID NO: 627, or SEQ ID NO: 631, with zero, one, or two single amino acid substitutions in one or more of the LCDRs. In some embodiments, the polynucleotide encodes a polypeptide subunit comprises a human kappa or lambda light chain constant region or fragment thereof fused to the C-terminal end of a VL comprising an amino acid sequence at least 80%, at least 85%, at least 90%, at least 95% or 100% identical to SEQ ID NO: 511, SEQ ID NO: 513, SEQ ID NO: 515, SEQ ID NO: 517, SEQ ID NO: 519, SEQ ID NO: 521, SEQ ID NO: 523, SEQ ID NO: 525, SEQ ID NO: 527, SEQ ID NO: 529, SEQ ID NO: 531, SEQ ID NO: 533, SEQ ID NO: 535, SEQ ID NO: 537, SEQ ID NO: 539, SEQ ID NO: 541, SEQ ID NO: 543, SEQ ID NO: 545, SEQ ID NO: 547, SEQ ID NO: 549, SEQ ID NO: 551, SEQ ID NO: 553, SEQ ID NO: 555, SEQ ID NO: 557, SEQ ID NO: 559, SEQ ID NO: 561, SEQ ID NO: 563, SEQ ID NO: 565, SEQ ID NO: 567, SEQ ID NO: 569, SEQ ID NO: 571, SEQ ID NO: 573, SEQ ID NO: 575, SEQ ID NO: 577, SEQ ID NO: 579, SEQ ID NO: 581, SEQ ID NO: 583, SEQ ID NO: 585, SEQ ID NO: 587, SEQ ID NO: 589, SEQ ID NO: 591, SEQ ID NO: 593, SEQ ID NO: 595, SEQ ID NO: 597, SEQ ID NO: 599, SEQ ID NO: 601, SEQ ID NO: 603, SEQ ID NO: 605, SEQ ID NO: 607, SEQ ID NO: 609, SEQ ID NO: 611, SEQ ID NO: 613, SEQ ID NO: 615, SEQ ID NO: 617, SEQ ID NO: 619, SEQ ID NO: 621, SEQ ID NO: 623, SEQ ID NO: 625, SEQ ID NO: 627, or SEQ ID NO: 631.

[0270] In certain embodiments, this disclosure provides a vector comprising one or more polynucleotides described herein. In some embodiments, the vector further comprises a polynucleotide comprising a nucleic acid sequence that encodes a J-chain or a functional fragment or variant thereof, such as a J-chain, functional fragment or variant thereof described herein.

[0271] In some embodiments, the vector is a viral vector, such as an adenoviral or adeno-associated viral (AAV) vector. In some embodiments, this disclosure provides a viral particle comprising a viral vector disclosed herein. In some embodiments, the viral particle is an adenoviral particle or an AAV particle.

[0272] In certain embodiments, this disclosure provides a composition comprising a first vector and a second vector, where: a) the first vector comprises a polynucleotide comprising a nucleic acid sequence that encodes the heavy chain of the multimeric binding molecule and the second vector comprises a polynucleotide comprising a nucleic acid sequence that encodes the light chain of the multimeric binding molecule, b) the first vector comprises a polynucleotide comprising a nucleic acid sequence that encodes the heavy chain of the multimeric binding molecule and a polynucleotide comprising a nucleic acid sequence that encodes the light chain of the multimeric binding molecule and the second vector comprises a polynucleotide comprising a nucleic acid sequence that encodes a J-chain or a functional fragment or variant thereof, c) the first vector comprises a polynucleotide comprising a nucleic acid sequence that encodes the heavy chain of the multimeric binding molecule and a polynucleotide comprising a nucleic acid sequence that encodes a J-chain or a functional fragment or variant thereof and the second vector comprises a polynucleotide comprising a nucleic acid sequence that encodes the light chain of the multimeric binding molecule, or d) the first vector comprises a polynucleotide comprising a nucleic acid sequence that encodes the light chain of the multimeric binding molecule and a polynucleotide comprising a nucleic acid sequence that encodes a J-chain or a functional fragment or variant thereof and the second vector comprises a polynucleotide comprising a nucleic acid sequence that encodes the heavy chain of the multimeric binding molecule. In certain embodiments, this disclosure provides a composition comprising a first vector, a second vector, and a third vector, where the first vector comprises a polynucleotide comprising a nucleic acid sequence that encodes the heavy chain of the multimeric binding molecule, the second vector comprises a polynucleotide comprising a nucleic acid sequence that encodes the light chain of the multimeric binding molecule, and the third vector comprises a polynucleotide comprising a nucleic acid sequence that encodes a J-chain or a functional fragment or variant thereof.

### Host Cells

[0273] In certain embodiments, this disclosure provides a host cell that is capable of producing the multimeric binding molecule as provided herein. In certain embodiments, the host cell comprises one or more vectors, a composition comprising multiple vectors, or polynucleotides disclosed herein. The disclosure also provides a method of producing the multimeric binding molecule as provided herein, where the method comprises culturing the provided host cell, and recovering the multimeric binding molecule.

### Methods of Use

[0274] The disclosure further provides a method of treating a disease or disorder in a subject in need of treatment, where the method includes administering to the subject a therapeutically effective amount of a multimeric binding molecule as provided herein. By “therapeutically effective dose or amount” or “effective amount” is intended an amount of a multimeric binding molecule that when administered brings about a positive therapeutic response with respect to treatment of subject. Examples of positive therapeutic responses include, without limitation, prevention of respiratory tract colonization or infection by a human coronavirus, e.g., SARS-CoV, SARS-CoV-2, or MERS-CoV, prevention of human coronavirus, e.g., SARS-CoV, SARS-CoV-2, or MERS-CoV attachment, penetration, and/or replication upon exposure to the virus, prevention of human coronavirus, e.g., SARS-CoV, SARS-CoV-2, or MERS-CoV symptoms, alleviation of human coronavirus, e.g., SARS-CoV, SARS-CoV-2, or MERS-CoV symptoms, reduction of the number of human coronavirus, e.g., SARS-CoV, SARS-CoV-2, or MERS-CoV symptoms, or reduction in the severity of human coronavirus, e.g., SARS-CoV, SARS-CoV-2, or MERS-CoV symptoms. “Symptoms” include, without limitation, one or more of fever, chills, muscle or body aches, fatigue, headache, sore throat, coughing, shortness of breath, difficulty breathing, loss of taste and/or the ability to smell, pneumonia, congestion, nausea, or diarrhea.

[0275] Effective doses of compositions for treatment of a disease or disorder vary depending upon many different factors, including means of administration, target site, physiological state of the subject, whether the subject is human or an animal, other medications administered, and whether treatment is prophylactic or therapeutic. Usually, the subject is a human, but non-human mammals including transgenic mammals can also be treated. Treatment dosages can be titrated using routine methods known to those of skill in the art to optimize safety and efficacy.

[0276] In certain embodiments, the disclosure provides a method for treating a human coronavirus disease, e.g., Corona Virus Disease 2019 (COVID-19) in a subject in need of treatment, where the method includes administering to the subject an effective amount of a multimeric binding molecule as provided herein. In certain embodiments, administration of a multimeric binding molecule as provided herein to a subject results in greater potency, e.g., greater efficacy at an equivalent dose or the ability to administer a lower dose and achieve equivalent efficacy, than administration of an equivalent amount of a monomeric binding molecule, such as an IgG, binding to the same binding partner. By “efficacy” is meant the ability of the treatment to, for example, reduce symptoms in an infected subject, reduce the severity of symptoms in an infected subject, prevent symptoms in an infected but asymptomatic subject, reduce the need for auxiliary oxygen in an infected subject or reduce time on a ventilator, reduce the need or the dosage of concomitant medications, reduce the time in intensive care, spare hospital resources, or prevent or reduce transmission from an infected subject to non-infected persons. In certain embodiments the multimeric binding molecule as provided herein can also treat the subject more safely, e.g., by preventing antibody-dependent enhancement of infection, and by effectively neutralizing “escape mutant” viruses. In certain embodiments the monomeric binding molecule includes identical binding polypeptides to the multimeric binding molecule as provided herein. By “an equivalent amount” is meant, e.g., an amount measured by molecular weight, e.g., in total milligrams, or alternatively, a molar equivalent, e.g., where equivalent numbers of molecules are administered.

[0277] In other embodiments, the disclosure provides a method for preventing a human coronavirus disease, e.g., Corona Virus Disease 2019 (COVID-19) in a subject in need thereof, e.g., a subject susceptible to human coronavirus, e.g., SARS-CoV-2 infection or a subject susceptible to more severe human coronavirus infection-associated disease or disorder, e.g., COVID-19 symptoms due to proximity to human coronavirus infection-associated disease or disorder, e.g., COVID-19 patients, e.g., healthcare providers and/or family members, or due to secondary conditions such as advanced age, diabetes, heart disease, or obesity, where the method includes administering to the subject an effective amount of a multimeric binding molecule as provided herein. In certain embodiments, administration of a multimeric binding molecule as provided herein to a subject results in greater potency, e.g., as noted above, than administration of an equivalent amount of a monomeric binding polypeptide, such as an IgG, binding to the same binding partner. In certain embodiments the monomeric binding molecule includes identical antigen binding domains to the multimeric binding molecule as provided herein. By “an equivalent amount” is meant, e.g., an amount measured by molecular weight, e.g., in total milligrams, or alternative, a molar equivalent, e.g., where equivalent numbers of molecules are administered.

[0278] The subject can be any animal, e.g., a mammal, in need of treatment or prevention, in certain embodiments, the subject is a human subject.

[0279] In its simplest form, a preparation to be administered to a subject is multimeric binding molecule as provided herein administered in a conventional dosage form, which can be combined with a pharmaceutical excipient, carrier or diluent as described elsewhere herein.

[0280] A multimeric binding molecule of the disclosure can be administered by any suitable method, e.g., parenterally, intraventricularly, orally, by inhalation spray, topically, rectally, intranasally, buccally, vaginally, via an implanted reservoir, or a combination thereof. The term “parenteral” as used herein includes subcutaneous, intravenous, intramuscular, intra-articular, intra-synovial, intrasternal, intrathecal, intrahepatic, intralesional and intracranial injection or infusion techniques.

[0281] In certain embodiments the multimeric binding molecule is delivered intranasally, e.g., in an atomized form produced by a suitable spray delivery device, e.g., a MAD NASAL™ Intranasal Mucosal Atomization Device, produced by Teleflex. In certain embodiments, the multimeric binding molecule is delivered orally, e.g., in an atomized form produced by a suitable spray delivery device, e.g., a MAD NASAL™ Intranasal Mucosal Atomization Device, produced by Teleflex. In certain embodiments, the multimeric binding molecule is delivered intranasally and orally, e.g., in an atomized form produced by a suitable spray delivery device, e.g., a MAD NASAL™ Intranasal Mucosal Atomization Device, produced by Teleflex.

[0282] In certain embodiments the multimeric binding molecule is delivered via inhalation, e.g., in a nebulized form.

[0283] In certain embodiments the multimeric binding molecule is delivered intravenously. In certain embodiments the multimeric binding molecule is delivered intranasally, e.g., in an atomized form produced by a suitable spray delivery device, e.g., a MAD NASAL™ Intranasal Mucosal Atomization Device, produced by Teleflex and is delivered intravenously. In certain embodiments, the multimeric binding molecule is delivered orally, e.g., in an atomized form produced by a suitable spray delivery device, e.g., a MAD NASAL™ Intranasal Mucosal Atomization Device, produced by Teleflex and is delivered intravenously. In certain embodiments, the multimeric binding molecule is delivered intranasally and orally, e.g., in an atomized form produced by a suitable spray delivery device, e.g., a MAD NASAL™ Intranasal Mucosal Atomization Device, produced by Teleflex and is delivered intravenously.

### Pharmaceutical Compositions and Administration Methods

[0284] The disclosure further provides a composition, e.g., a pharmaceutical composition, comprising a multimeric binding molecule, or two or more multimeric binding molecules, as provided herein. In certain embodiments the composition includes a cocktail of two or more different multimeric binding molecules as described here, that bind to different epitopes on a single human coronavirus, e.g., SARS-CoV-2 or MERS-CoV. In certain aspects the different epitopes can be on the same coronavirus protein, e.g., structural protein, for example the spike (S) protein. A composition as provided herein can further include a pharmaceutically acceptable carrier and/or excipient and can be formulated so as to be suitable for a desired mode of administration.

[0285] Methods of preparing and administering a multimeric binding molecule as provided herein to a subject in need thereof can be determined by a skilled person in view of this disclosure. The route of administration of can be, for example, oral, parenteral, intranasally, by inhalation, by aerosol, or topical. The term parenteral as used herein includes, e.g., intravenous, intraarterial, intraperitoneal, intramuscular, subcutaneous, rectal, or vaginal administration. While these forms of administration are contemplated as suitable forms, another example of a form for administration would be a solution for injection, in particular for intravenous, or intraarterial injection or drip. A suitable pharmaceutical composition can include a buffer (e.g., acetate, phosphate, or citrate buffer), a surfactant (e.g., polysorbate), optionally a stabilizer agent (e.g., human albumin), etc.

[0286] As discussed herein, a multimeric binding molecule as provided herein can be administered in a pharmaceutically effective amount for the treatment of a subject in need thereof. In this regard, it will be appreciated that the disclosed multimeric binding molecule can be formulated so as to facilitate administration and promote stability of the active agent. Pharmaceutical compositions accordingly can include a pharmaceutically acceptable, non-toxic, sterile carrier such as physiological saline, non-toxic buffers, preservatives, and the like. A pharmaceutically effective amount of a multimeric binding molecule as provided herein means an amount sufficient to achieve effective binding to a target and to achieve a therapeutic benefit. Suitable formulations are described in Remington's Pharmaceutical Sciences (Mack Publishing Co.) 16th ed. (1980).

[0287] Certain pharmaceutical compositions provided herein can be orally administered in an acceptable dosage form including, e.g., capsules, tablets, aqueous suspensions, or solutions.

[0288] Certain pharmaceutical compositions also can be administered by nasal aerosol or inhalation. Such compositions can be prepared as solutions in saline, employing benzyl alcohol or other suitable preservatives, absorption promoters to enhance bioavailability, and/or other conventional solubilizing or dispersing agents. In some embodiments, the pharmaceutical composition is administered by nasal aerosol. In some embodiments, the pharmaceutical composition is for administration by nasal aerosol. In some embodiments, the pharmaceutical composition, such as a pharmaceutical composition for administration by nasal aerosol, comprises a pH adjuster, such as HCl; a buffer; an emulsifier, such as polysorbate or carbomer; sugar or mono- or polyol, such as a monosaccharide (e.g., glucose, dextrose, or fructose), disaccharide (e.g., sucrose, lactose, or maltose), ribose, glycerin, sorbitol, xylitol, inositol, propylene glycol, galactose, mannose, xylose, rhamnose, glutaraldehyde, ethanol, mannitol, polyethylene glycol, glycerol, chitosal, phenylethyl alcohol; a preservative; cellulose, such as microcrystalline cellulose or carboxymethylcellulose; or mixtures thereof.

[0289] In some embodiments, the pharmaceutical composition is administered by inhalation. In some embodiments, the pharmaceutical composition is for administration by inhalation. In some embodiments, the pharmaceutical composition, such as a pharmaceutical composition for administration by inhalation, is a dry powder, such as for a dry powder inhaler, or a liquid, such as for a nebulizer, such as an airjet-compressor nebulizer or a mesh-based nebulizer. In some embodiments, the pharmaceutical composition, such as a pharmaceutical composition for administration by inhalation, comprises sugar or mono- or polyol, such as lactose, trelose, mannitol, sorbitol; buffer, such as histidine, proline, or arginine buffer; saline; polysorbate; or mixtures thereof.

[0290] The amount of a multimeric binding molecule that can be combined with carrier materials to produce a single dosage form will vary depending, e.g., upon the subject treated and the particular mode of administration. The composition can be administered as a single dose, multiple doses or over an established period of time in an infusion. Dosage regimens also can be adjusted to provide the optimum desired response (e.g., a therapeutic or prophylactic response).

[0291] In keeping with the scope of the present disclosure, a multimeric binding molecule as provided herein can be administered to a subject in need of therapy in an amount sufficient to produce a therapeutic effect or a prophylactic effect. A multimeric binding molecule as provided herein can be administered to the subject in a conventional dosage form prepared by combining the multimeric binding molecule of the disclosure with a conventional pharmaceutically acceptable carrier or diluent according to known techniques. The form and character of the pharmaceutically acceptable carrier or diluent can be dictated by the amount of active ingredient with which it is to be combined, the route of administration and other well-known variables.

[0292] This disclosure also provides for the use of a multimeric binding molecule as provided herein in the manufacture of a medicament for treating, preventing, or managing a human coronavirus infection, e.g., COVID-19.

[0293] In some embodiments, the compositions and methods provided herein can be used for the treatment of infections that have not been effectively treated using existing or established treatments.

[0294] This disclosure employs, unless otherwise indicated, conventional techniques of cell biology, cell culture, molecular biology, transgenic biology, microbiology, recombinant DNA, and immunology, which are within the skill of the art. Such techniques are explained fully in the literature. See, for example, Green and Sambrook, ed. (2012) Molecular Cloning A Laboratory Manual (4th ed.; Cold Spring Harbor Laboratory Press); Sambrook et al., ed. (1992) Molecular Cloning: A Laboratory Manual, (Cold Springs Harbor Laboratory, NY); D. N. Glover and B. D. Hames, eds., (1995) DNA Cloning 2d Edition (IRL Press), Volumes 1-4; Gait, ed. (1990) Oligonucleotide Synthesis (IRL Press); Mullis et al. U.S. Pat. No. 4,683,195; Hames and Higgins, eds. (1985) Nucleic Acid Hybridization (IRL Press); Hames and Higgins, eds. (1984) Transcription And Translation (IRL Press); Freshney (2016) Culture Of Animal Cells, 7th Edition (Wiley-Blackwell); Woodward, J., Immobilized Cells And Enzymes (IRL Press) (1985); Perbal (1988) A Practical Guide To Molecular Cloning; 2d Edition (Wiley-Interscience); Miller and Calos eds. (1987) Gene Transfer Vectors For Mammalian Cells, (Cold Spring Harbor Laboratory); S. C. Makrides (2003) Gene Transfer and Expression in Mammalian Cells (Elsevier Science); Methods in Enzymology, Vols. 151-155 (Academic Press, Inc., N.Y.); Mayer and Walker, eds. (1987) Immunochemical Methods in Cell and Molecular Biology (Academic Press, London); Weir and Blackwell, eds.; and in Ausubel et al. (1995) Current Protocols in Molecular Biology (John Wiley and Sons).

[0295] General principles of antibody engineering are set forth, e.g., in Strohl, W. R., and L. M. Strohl (2012), Therapeutic Antibody Engineering (Woodhead Publishing). General principles of protein engineering are set forth, e.g., in Park and Cochran, eds. (2009), Protein Engineering and Design (CDC Press). General principles of immunology are set forth, e.g., in: Abbas and Lichtman (2017) Cellular and Molecular Immunology 9th Edition (Elsevier). Additionally, standard methods in immunology known in the art can be followed, e.g., in Current Protocols in Immunology (Wiley Online Library); Wild, D. (2013), The Immunoassay Handbook 4th Edition (Elsevier Science); Greenfield, ed. (2013), Antibodies, a Laboratory Manual, 2d Edition (Cold Spring Harbor Press); and Ossipow and Fischer, eds., (2014), Monoclonal Antibodies: Methods and Protocols (Humana Press).

[0296] All of the references cited above, as well as all references cited herein, are incorporated herein by reference in their entireties.

[0297] The following examples are offered by way of illustration and not by way of limitation.

### EXEMPLARY EMBODIMENTS

[0298] Among the provided embodiments are:

[0299] Embodiment 1. A multimeric binding molecule comprising two to six bivalent binding units or variants or fragments thereof, wherein each binding unit comprises two IgM or IgA heavy chain constant regions or multimerizing fragments or variants thereof, each associated with a binding domain, wherein three to twelve of the binding domains are identical and specifically bind to a human coronavirus, and wherein the binding molecule is more potent than a bivalent reference IgG antibody comprising two of the binding domains that specifically bind to the human coronavirus.

[0300] Embodiment 2. The multimeric binding molecule of embodiment 1, wherein the human coronavirus is SARS-CoV, MERS-CoV, SARS-CoV-2, variants thereof, derivatives thereof, or any combination thereof.

[0301] Embodiment 3. The multimeric binding molecule of embodiment 1 or embodiment 2, wherein the binding molecule can neutralize infectivity of the human coronavirus at a greater potency than the bivalent reference IgG antibody comprising two of the binding domains that specifically bind to the human coronavirus.

[0302] Embodiment 4. The multimeric binding molecule of embodiment 3, wherein the binding molecule can neutralize infectivity of the human coronavirus at a lower 50% effective concentration (EC50) than the bivalent reference IgG antibody.

[0303] Embodiment 5. The multimeric binding molecule of embodiment 4, wherein the EC50 is at least two-fold, at least five-fold, at least ten-fold, at least fifty-fold, at least 100-fold, at least 500-fold, or at least 1000-fold lower than the EC50 of the bivalent reference IgG antibody.

[0304] Embodiment 6. The multimeric binding molecule of embodiment 1 or embodiment 2, wherein the binding molecule can inhibit binding of the human coronavirus to its receptor at a lower 50% inhibitory concentration (IC50) than the bivalent reference IgG antibody.

[0305] Embodiment 7. The multimeric binding molecule of embodiment 6, wherein the human coronavirus is SARS-CoV or SARS-CoV-2 and the receptor is human angiotensin-converting enzyme 2 (ACE2), or wherein the human coronavirus is MERS-CoV and the receptor is human dipeptidyl-peptidase 4 (DPP4).

[0306] Embodiment 8. The multimeric binding molecule of any one of embodiments 1 to 7, wherein the three to twelve binding domains that specifically bind to a human coronavirus bind a human coronavirus structural protein or fragment thereof.

[0307] Embodiment 9. The multimeric binding molecule of embodiment 8, wherein the human coronavirus structural protein comprises a nucleocapsid (N) protein, a membrane (M) protein, an envelope (E) protein, a spike (S) protein, any fragment thereof, any subunit thereof, or any combination thereof.

[0308] Embodiment 10. The multimeric binding molecule of embodiment 9, wherein the human coronavirus structural protein comprises the S protein, a fragment thereof, or a subunit thereof.

[0309] Embodiment 11. The multimeric binding molecule of embodiment 10, wherein the three to twelve binding domains that specifically bind to the human coronavirus S protein bind the S protein subunit 1 (S1), the S protein receptor binding domain (RBD), the S protein subunit 2 (S2), the S protein furin cleavage site, or any combination thereof.

[0310] Embodiment 12. The multimeric binding molecule of embodiment 11, wherein the three to twelve binding domains that specifically bind to the human coronavirus S protein bind the S protein RBD.

[0311] Embodiment 13. The multimeric binding molecule of any one of embodiments 1 to 12, wherein the three to twelve identical binding domains are immunoglobulin antigen binding domains comprising a heavy chain variable region (VH) and a light chain variable region (VL).

[0312] Embodiment 14. The multimeric binding molecule of embodiment 13, wherein each binding unit comprises two heavy chains each comprising a VH and two light chains each comprising a VL.

[0313] Embodiment 15. The multimeric binding molecule of embodiment 13 or embodiment 14, wherein the immunoglobulin antigen-binding domains are human or humanized antigen binding domains.

[0314] Embodiment 16. The multimeric binding molecule of any one of embodiments 1 to 12, wherein the three to twelve identical binding domains are single-domain variable regions (VHH), and wherein each binding unit comprises two heavy chains each comprising the VHH.

[0315] Embodiment 17. The multimeric binding molecule of any one of embodiments 1 to 16, wherein the human coronavirus is SARS-CoV-2.

[0316] Embodiment 18. The multimeric binding molecule of embodiment 17, wherein the three to twelve identical binding domains each specifically bind to SARS-CoV-2 and comprise a heavy chain variable region (VH) and a light chain variable region (VL), wherein the VH and VL comprise six immunoglobulin complementarity determining regions HCDR1, HCDR2, HCDR3, LCDR1, LCDR2, and LCDR3, and wherein the HCDR1, HCDR2, HCDR3, LCDR1, LCDR2, and LCDR3 comprise the CDRs of an antibody comprising the VH and VL of SEQ ID NO: 84 and SEQ ID NO: 85, SEQ ID NO: 86 and SEQ ID NO: 87, SEQ ID NO: 88 and SEQ ID NO: 89, SEQ ID NO: 90 and SEQ ID NO: 91, SEQ ID NO: 92 and SEQ ID NO: 93, SEQ ID NO: 94 and SEQ ID NO: 95, SEQ ID NO: 96 and SEQ ID NO: 97, SEQ ID NO: 98 and SEQ ID NO: 99, SEQ ID NO: 100 and SEQ ID NO: 101, SEQ ID NO: 102 and SEQ ID NO: 103, SEQ ID NO: 104 and SEQ ID NO: 105, SEQ ID NO: 106 and SEQ ID NO: 107, SEQ ID NO: 108 and SEQ ID NO: 109, SEQ ID NO: 110 and SEQ ID NO: 111, SEQ ID NO: 112 and SEQ ID NO: 113, SEQ ID NO: 114 and SEQ ID NO: 115, SEQ ID NO: 116 and SEQ ID NO: 117, SEQ ID NO: 118 and SEQ ID NO: 119, SEQ ID NO: 120 and SEQ ID NO: 121, SEQ ID NO: 122 and SEQ ID NO: 123, SEQ ID NO: 124 and SEQ ID NO: 125, SEQ ID NO: 126 and SEQ ID NO: 127, SEQ ID NO: 128 and SEQ ID NO: 129, SEQ ID NO: 130 and SEQ ID NO: 131, SEQ ID NO: 132 and SEQ ID NO: 133, SEQ ID NO: 134 and SEQ ID NO: 135, SEQ ID NO: 136 and SEQ ID NO: 137, SEQ ID NO: 138 and SEQ ID NO: 139, SEQ ID NO: 140 and SEQ ID NO: 141, SEQ ID NO: 142 and SEQ ID NO: 143, SEQ ID NO: 144 and SEQ ID NO: 145, SEQ ID NO: 146 and SEQ ID NO: 147, SEQ ID NO: 148 and SEQ ID NO: 149, SEQ ID NO: 150 and SEQ ID NO: 151, SEQ ID NO: 152 and SEQ ID NO: 153, SEQ ID NO: 154 and SEQ ID NO: 155, SEQ ID NO: 156 and SEQ ID NO: 157, SEQ ID NO: 158 and SEQ ID NO: 159, SEQ ID NO: 160 and SEQ ID NO: 161, SEQ ID NO: 162 and SEQ ID NO: 163, SEQ ID NO: 164 and SEQ ID NO: 165, SEQ ID NO: 166 and SEQ ID NO: 167, SEQ ID NO: 168 and SEQ ID NO: 169, SEQ ID NO: 170 and SEQ ID NO: 171, SEQ ID NO: 172 and SEQ ID NO: 173, SEQ ID NO: 174 and SEQ ID NO: 175, SEQ ID NO: 176 and SEQ ID NO: 177, SEQ ID NO: 178 and SEQ ID NO: 179, SEQ ID NO: 180 and SEQ ID NO: 181, SEQ ID NO: 182 and SEQ ID NO: 183, SEQ ID NO: 184 and SEQ ID NO: 185, SEQ ID NO: 186 and SEQ ID NO: 187, SEQ ID NO: 188 and SEQ ID NO: 189, SEQ ID NO: 190 and SEQ ID NO: 191, SEQ ID NO: 192 and SEQ ID NO: 193, SEQ ID NO: 194 and SEQ ID NO: 195, SEQ ID NO: 196 and SEQ ID NO: 197, SEQ ID NO: 198 and SEQ ID NO: 199, SEQ ID NO: 200 and SEQ ID NO: 201, SEQ ID NO: 202 and SEQ ID NO: 203, SEQ ID NO: 204 and SEQ ID NO: 205, SEQ ID NO: 206 and SEQ ID NO: 207, SEQ ID NO: 208 and SEQ ID NO: 209, SEQ ID NO: 210 and SEQ ID NO: 211, SEQ ID NO: 212 and SEQ ID NO: 213, SEQ ID NO: 214 and SEQ ID NO: 215, SEQ ID NO: 216 and SEQ ID NO: 217, SEQ ID NO: 218 and SEQ ID NO: 219, SEQ ID NO: 220 and SEQ ID NO: 221, SEQ ID NO: 222 and SEQ ID NO: 223, SEQ ID NO: 224 and SEQ ID NO: 225, SEQ ID NO: 226 and SEQ ID NO: 227, SEQ ID NO: 228 and SEQ ID NO: 229, SEQ ID NO: 230 and SEQ ID NO: 231, SEQ ID NO: 232 and SEQ ID NO: 233, SEQ ID NO: 234 and SEQ ID NO: 235, SEQ ID NO: 236 and SEQ ID NO: 237, SEQ ID NO: 238 and SEQ ID NO: 239, SEQ ID NO: 240 and SEQ ID NO: 241, SEQ ID NO: 242 and SEQ ID NO: 243, SEQ ID NO: 244 and SEQ ID NO: 245, SEQ ID NO: 246 and SEQ ID NO: 247, SEQ ID NO: 248 and SEQ ID NO: 249, SEQ ID NO: 250 and SEQ ID NO: 251, SEQ ID NO: 252 and SEQ ID NO: 253, SEQ ID NO: 254 and SEQ ID NO: 255, SEQ ID NO: 256 and SEQ ID NO: 257, SEQ ID NO: 258 and SEQ ID NO: 259, SEQ ID NO: 260 and SEQ ID NO: 261, SEQ ID NO: 264 and SEQ ID NO: 265, SEQ ID NO: 266 and SEQ ID NO: 267, SEQ ID NO: 268 and SEQ ID NO: 269, SEQ ID NO: 270 and SEQ ID NO: 271, SEQ ID NO: 272 and SEQ ID NO: 273, SEQ ID NO: 274 and SEQ ID NO: 275, SEQ ID NO: 276 and SEQ ID NO: 277, SEQ ID NO: 278 and SEQ ID NO: 279, SEQ ID NO: 280 and SEQ ID NO: 281, SEQ ID NO: 282 and SEQ ID NO: 283, SEQ ID NO: 292 and SEQ ID NO: 293, SEQ ID NO: 294 and SEQ ID NO: 295, SEQ ID NO: 296 and SEQ ID NO: 297, SEQ ID NO: 298 and SEQ ID NO: 299, SEQ ID NO: 300 and SEQ ID NO: 301, SEQ ID NO: 302 and SEQ ID NO: 303, SEQ ID NO: 304 and SEQ ID NO: 305, SEQ ID NO: 306 and SEQ ID NO: 307, SEQ ID NO: 308 and SEQ ID NO: 309, SEQ ID NO: 310 and SEQ ID NO: 311, SEQ ID NO: 312 and SEQ ID NO: 313, SEQ ID NO: 314 and SEQ ID NO: 315, SEQ ID NO: 316 and SEQ ID NO: 317, SEQ ID NO: 318 and SEQ ID NO: 319, SEQ ID NO: 320 and SEQ ID NO: 321, SEQ ID NO: 322 and SEQ ID NO: 323, SEQ ID NO: 324 and SEQ ID NO: 325, SEQ ID NO: 326 and SEQ ID NO: 327, SEQ ID NO: 328 and SEQ ID NO: 329, SEQ ID NO: 330 and SEQ ID NO: 331, SEQ ID NO: 332 and SEQ ID NO: 333, SEQ ID NO: 336 and SEQ ID NO: 337, SEQ ID NO: 338 and SEQ ID NO: 339, SEQ ID NO: 340 and SEQ ID NO: 341, SEQ ID NO: 342 and SEQ ID NO: 343, SEQ ID NO: 344 and SEQ ID NO: 345, SEQ ID NO: 348 and SEQ ID NO: 349, SEQ ID NO: 350 and SEQ ID NO: 351, SEQ ID NO: 352 and SEQ ID NO: 353, SEQ ID NO: 354 and SEQ ID NO: 355, SEQ ID NO: 356 and SEQ ID NO: 357, SEQ ID NO: 358 and SEQ ID NO: 359, SEQ ID NO: 362 and SEQ ID NO: 363, SEQ ID NO: 364 and SEQ ID NO: 365, SEQ ID NO: 366 and SEQ ID NO: 367, SEQ ID NO: 368 and SEQ ID NO: 369, SEQ ID NO: 370 and SEQ ID NO: 371, SEQ ID NO: 372 and SEQ ID NO: 373, SEQ ID NO: 374 and SEQ ID NO: 375, SEQ ID NO: 376 and SEQ ID NO: 377, SEQ ID NO: 378 and SEQ ID NO: 379, SEQ ID NO: 380 and SEQ ID NO: 381, SEQ ID NO: 382 and SEQ ID NO: 383, SEQ ID NO: 384 and SEQ ID NO: 385, SEQ ID NO: 386 and SEQ ID NO: 387, SEQ ID NO: 388 and SEQ ID NO: 389, SEQ ID NO: 390 and SEQ ID NO: 391, SEQ ID NO: 392 and SEQ ID NO: 393, SEQ ID NO: 394 and SEQ ID NO: 395, SEQ ID NO: 396 and SEQ ID NO: 397, SEQ ID NO: 398 and SEQ ID NO: 399, SEQ ID NO: 400 and SEQ ID NO: 401, SEQ ID NO: 402 and SEQ ID NO: 403, SEQ ID NO: 404 and SEQ ID NO: 405, SEQ ID NO: 406 and SEQ ID NO: 407, SEQ ID NO: 408 and SEQ ID NO: 409, SEQ ID NO: 410 and SEQ ID NO: 411, SEQ ID NO: 412 and SEQ ID NO: 413, SEQ ID NO: 414 and SEQ ID NO: 415, SEQ ID NO: 416 and SEQ ID NO: 417, SEQ ID NO: 418 and SEQ ID NO: 419, SEQ ID NO: 420 and SEQ ID NO: 421, SEQ ID NO: 422 and SEQ ID NO: 423, SEQ ID NO: 424 and SEQ ID NO: 425, SEQ ID NO: 426 and SEQ ID NO: 427, SEQ ID NO: 428 and SEQ ID NO: 429, SEQ ID NO: 430 and SEQ ID NO: 431, SEQ ID NO: 432 and SEQ ID NO: 433, SEQ ID NO: 434 and SEQ ID NO: 435, SEQ ID NO: 436 and SEQ ID NO: 437, SEQ ID NO: 438 and SEQ ID NO: 439, SEQ ID NO: 440 and SEQ ID NO: 441, SEQ ID NO: 442 and SEQ ID NO: 443, SEQ ID NO: 444 and SEQ ID NO: 445, SEQ ID NO: 446 and SEQ ID NO: 447, SEQ ID NO: 448 and SEQ ID NO: 449, SEQ ID NO: 450 and SEQ ID NO: 451, SEQ ID NO: 452 and SEQ ID NO: 453, SEQ ID NO: 454 and SEQ ID NO: 455, SEQ ID NO: 456 and SEQ ID NO: 457, SEQ ID NO: 458 and SEQ ID NO: 459, SEQ ID NO: 460 and SEQ ID NO: 461, SEQ ID NO: 462 and SEQ ID NO: 463, SEQ ID NO: 464 and SEQ ID NO: 465, SEQ ID NO: 466 and SEQ ID NO: 467, SEQ ID NO: 468 and SEQ ID NO: 469, SEQ ID NO: 470 and SEQ ID NO: 471, SEQ ID NO: 472 and SEQ ID NO: 473, SEQ ID NO: 474 and SEQ ID NO: 475, SEQ ID NO: 476 and SEQ ID NO: 477, SEQ ID NO: 478 and SEQ ID NO: 479, SEQ ID NO: 480 and SEQ ID NO: 481, SEQ ID NO: 482 and SEQ ID NO: 483, SEQ ID NO: 484 and SEQ ID NO: 485, SEQ ID NO: 486 and SEQ ID NO: 487, SEQ ID NO: 488 and SEQ ID NO: 489, SEQ ID NO: 490 and SEQ ID NO: 491, SEQ ID NO: 492 and SEQ ID NO: 493, SEQ ID NO: 494 and SEQ ID NO: 495, SEQ ID NO: 496 and SEQ ID NO: 497, SEQ ID NO: 498 and SEQ ID NO: 499, SEQ ID NO: 500 and SEQ ID NO: 501, SEQ ID NO: 502 and SEQ ID NO: 503, SEQ ID NO: 504 and SEQ ID NO: 505, SEQ ID NO: 506 and SEQ ID NO: 507, SEQ ID NO: 508 and SEQ ID NO: 509, SEQ ID NO: 628 and SEQ ID NO: 629, SEQ ID NO: 630 and SEQ ID NO: 631, SEQ ID NO: 632 and SEQ ID NO: 633, SEQ ID NO: 634 and SEQ ID NO: 635, SEQ ID NO: 636 and SEQ ID NO: 637, SEQ ID NO: 638 and SEQ ID NO: 639, SEQ ID NO: 640 and SEQ ID NO: 641, SEQ ID NO: 642 and SEQ ID NO: 643, SEQ ID NO: 644 and SEQ ID NO: 645, SEQ ID NO: 646 and SEQ ID NO: 647, SEQ ID NO: 648 and SEQ ID NO: 649, SEQ ID NO: 650 and SEQ ID NO: 651, or SEQ ID NO: 652 and SEQ ID NO: 653, respectively with zero, one, or two single amino acid substitutions in one or more of the HCDRs or LCDRs.

[0317] Embodiment 19. The multimeric binding molecule of embodiment 18, wherein the VH and VL comprise amino acid sequences at least 80%, at least 85%, at least 90%, at least 95% or 100% identical to the recited VH and VL amino acid sequences, respectively.

[0318] Embodiment 20. The multimeric binding molecule of embodiment 18, wherein the VH and VL comprise six immunoglobulin complementarity determining regions HCDR1, HCDR2, HCDR3, LCDR1, LCDR2, and LCDR3, and wherein the HCDR1, HCDR2, HCDR3, LCDR1, LCDR2, and LCDR3 comprise the CDRs of an antibody comprising the VH and VL of SEQ ID NO: 86 and SEQ ID NO: 87, SEQ ID NO: 88 and SEQ ID NO: 89, SEQ ID NO: 90 and SEQ ID NO: 91, SEQ ID NO: 92 and SEQ ID NO: 93, SEQ ID NO: 94 and SEQ ID NO: 95, SEQ ID NO: 96 and SEQ ID NO: 97, SEQ ID NO: 98 and SEQ ID NO: 99, SEQ ID NO: 100 and SEQ ID NO: 101, SEQ ID NO: 102 and SEQ ID NO: 103, SEQ ID NO: 106 and SEQ ID NO: 107, SEQ ID NO: 110 and SEQ ID NO: 111, SEQ ID NO: 118 and SEQ ID NO: 119, SEQ ID NO: 128 and SEQ ID NO: 129, SEQ ID NO: 130 and SEQ ID NO: 131, SEQ ID NO: 132 and SEQ ID NO: 133, SEQ ID NO: 134 and SEQ ID NO: 135, SEQ ID NO: 136 and SEQ ID NO: 137, SEQ ID NO: 142 and SEQ ID NO: 143, SEQ ID NO: 146 and SEQ ID NO: 147, SEQ ID NO: 150 and SEQ ID NO: 151, SEQ ID NO: 156 and SEQ ID NO: 157, SEQ ID NO: 160 and SEQ ID NO: 161, SEQ ID NO: 162 and SEQ ID NO: 163, SEQ ID NO: 164 and SEQ ID NO: 165, SEQ ID NO: 166 and SEQ ID NO: 167, SEQ ID NO: 168 and SEQ ID NO: 169, SEQ ID NO: 170 and SEQ ID NO: 171, SEQ ID NO: 172 and SEQ ID NO: 173, SEQ ID NO: 174 and SEQ ID NO: 175, SEQ ID NO: 176 and SEQ ID NO: 177, SEQ ID NO: 180 and SEQ ID NO: 181, SEQ ID NO: 182 and SEQ ID NO: 183, SEQ ID NO: 186 and SEQ ID NO: 187, SEQ ID NO: 188 and SEQ ID NO: 189, SEQ ID NO: 194 and SEQ ID NO: 195, SEQ ID NO: 200 and SEQ ID NO: 201, SEQ ID NO: 206 and SEQ ID NO: 207, SEQ ID NO: 208 and SEQ ID NO: 209, SEQ ID NO: 218 and SEQ ID NO: 219, SEQ ID NO: 220 and SEQ ID NO: 221, SEQ ID NO: 222 and SEQ ID NO: 223, SEQ ID NO: 224 and SEQ ID NO: 225, SEQ ID NO: 228 and SEQ ID NO: 229, SEQ ID NO: 230 and SEQ ID NO: 231, SEQ ID NO: 240 and SEQ ID NO: 241, SEQ ID NO: 244 and SEQ ID NO: 245, SEQ ID NO: 246 and SEQ ID NO: 247, SEQ ID NO: 256 and SEQ ID NO: 257, SEQ ID NO: 258 and SEQ ID NO: 259, SEQ ID NO: 260 and SEQ ID NO: 261, SEQ ID NO: 264 and SEQ ID NO: 265, SEQ ID NO: 266 and SEQ ID NO: 267, SEQ ID NO: 268 and SEQ ID NO: 269, SEQ ID NO: 270 and SEQ ID NO: 271, SEQ ID NO: 272 and SEQ ID NO: 273, SEQ ID NO: 274 and SEQ ID NO: 275, SEQ ID NO: 276 and SEQ ID NO: 277, SEQ ID NO: 278 and SEQ ID NO: 279, SEQ ID NO: 280 and SEQ ID NO: 281, SEQ ID NO: 282 and SEQ ID NO: 283, SEQ ID NO: 292 and SEQ ID NO: 293, SEQ ID NO: 294 and SEQ ID NO: 295, SEQ ID NO: 296 and SEQ ID NO: 297, SEQ ID NO: 298 and SEQ ID NO: 299, SEQ ID NO: 300 and SEQ ID NO: 301, SEQ ID NO: 302 and SEQ ID NO: 303, SEQ ID NO: 304 and SEQ ID NO: 305, SEQ ID NO: 306 and SEQ ID NO: 307, SEQ ID NO: 308 and SEQ ID NO: 309, SEQ ID NO: 310 and SEQ ID NO: 311, SEQ ID NO: 312 and SEQ ID NO: 313, SEQ ID NO: 314 and SEQ ID NO: 315, SEQ ID NO: 316 and SEQ ID NO: 317, SEQ ID NO: 318 and SEQ ID NO: 319, SEQ ID NO: 320 and SEQ ID NO: 321, SEQ ID NO: 322 and SEQ ID NO: 323, SEQ ID NO: 324 and SEQ ID NO: 325, SEQ ID NO: 326 and SEQ ID NO: 327, SEQ ID NO: 328 and SEQ ID NO: 329, SEQ ID NO: 330 and SEQ ID NO: 331, SEQ ID NO: 332 and SEQ ID NO: 333, SEQ ID NO: 336 and SEQ ID NO: 337, SEQ ID NO: 338 and SEQ ID NO: 339, SEQ ID NO: 340 and SEQ ID NO: 341, SEQ ID NO: 342 and SEQ ID NO: 343, SEQ ID NO: 344 and SEQ ID NO: 345, SEQ ID NO: 348 and SEQ ID NO: 349, SEQ ID NO: 350 and SEQ ID NO: 351, SEQ ID NO: 352 and SEQ ID NO: 353, SEQ ID NO: 354 and SEQ ID NO: 355, SEQ ID NO: 356 and SEQ ID NO: 357, SEQ ID NO: 358 and SEQ ID NO: 359, SEQ ID NO: 360 and SEQ ID NO: 361, SEQ ID NO: 362 and SEQ ID NO: 363, SEQ ID NO: 364 and SEQ ID NO: 365, SEQ ID NO: 366 and SEQ ID NO: 367, SEQ ID NO: 368 and SEQ ID NO: 369, SEQ ID NO: 370 and SEQ ID NO: 371, SEQ ID NO: 372 and SEQ ID NO: 373, SEQ ID NO: 374 and SEQ ID NO: 375, SEQ ID NO: 376 and SEQ ID NO: 377, SEQ ID NO: 378 and SEQ ID NO: 379, SEQ ID NO: 380 and SEQ ID NO: 381, SEQ ID NO: 382 and SEQ ID NO: 383, SEQ ID NO: 384 and SEQ ID NO: 385, SEQ ID NO: 386 and SEQ ID NO: 387, SEQ ID NO: 388 and SEQ ID NO: 389, SEQ ID NO: 390 and SEQ ID NO: 391, SEQ ID NO: 392 and SEQ ID NO: 393, SEQ ID NO: 394 and SEQ ID NO: 395, SEQ ID NO: 396 and SEQ ID NO: 397, SEQ ID NO: 398 and SEQ ID NO: 399, SEQ ID NO: 400 and SEQ ID NO: 401, SEQ ID NO: 402 and SEQ ID NO: 403, SEQ ID NO: 404 and SEQ ID NO: 405, SEQ ID NO: 406 and SEQ ID NO: 407, SEQ ID NO: 408 and SEQ ID NO: 409, SEQ ID NO: 410 and SEQ ID NO: 411, SEQ ID NO: 412 and SEQ ID NO: 413, SEQ ID NO: 414 and SEQ ID NO: 415, SEQ ID NO: 416 and SEQ ID NO: 417, SEQ ID NO: 418 and SEQ ID NO: 419, SEQ ID NO: 420 and SEQ ID NO: 421, SEQ ID NO: 422 and SEQ ID NO: 423, SEQ ID NO: 424 and SEQ ID NO: 425, SEQ ID NO: 426 and SEQ ID NO: 427, SEQ ID NO: 428 and SEQ ID NO: 429, SEQ ID NO: 430 and SEQ ID NO: 431, SEQ ID NO: 432 and SEQ ID NO: 433, SEQ ID NO: 434 and SEQ ID NO: 435, SEQ ID NO: 436 and SEQ ID NO: 437, SEQ ID NO: 438 and SEQ ID NO: 439, SEQ ID NO: 440 and SEQ ID NO: 441, SEQ ID NO: 442 and SEQ ID NO: 443, SEQ ID NO: 444 and SEQ ID NO: 445, SEQ ID NO: 446 and SEQ ID NO: 447, SEQ ID NO: 448 and SEQ ID NO: 449, SEQ ID NO: 450 and SEQ ID NO: 451, SEQ ID NO: 452 and SEQ ID NO: 453, SEQ ID NO: 454 and SEQ ID NO: 455, SEQ ID NO: 456 and SEQ ID NO: 457, SEQ ID NO: 458 and SEQ ID NO: 459, SEQ ID NO: 460 and SEQ ID NO: 461, SEQ ID NO: 462 and SEQ ID NO: 463, SEQ ID NO: 464 and SEQ ID NO: 465, SEQ ID NO: 466 and SEQ ID NO: 467, SEQ ID NO: 468 and SEQ ID NO: 469, SEQ ID NO: 470 and SEQ ID NO: 471, SEQ ID NO: 472 and SEQ ID NO: 473, SEQ ID NO: 474 and SEQ ID NO: 475, SEQ ID NO: 476 and SEQ ID NO: 477, SEQ ID NO: 478 and SEQ ID NO: 479, SEQ ID NO: 480 and SEQ ID NO: 481, SEQ ID NO: 482 and SEQ ID NO: 483, SEQ ID NO: 484 and SEQ ID NO: 485, SEQ ID NO: 486 and SEQ ID NO: 487, SEQ ID NO: 488 and SEQ ID NO: 489, SEQ ID NO: 490 and SEQ ID NO: 491, SEQ ID NO: 492 and SEQ ID NO: 493, SEQ ID NO: 494 and SEQ ID NO: 495, SEQ ID NO: 496 and SEQ ID NO: 497, SEQ ID NO: 498 and SEQ ID NO: 499, SEQ ID NO: 500 and SEQ ID NO: 501, SEQ ID NO: 502 and SEQ ID NO: 503, SEQ ID NO: 504 and SEQ ID NO: 505, SEQ ID NO: 506 and SEQ ID NO: 507, SEQ ID NO: 508 and SEQ ID NO: 509, SEQ ID NO: 628 and SEQ ID NO: 629, SEQ ID NO: 632 and SEQ ID NO: 633, SEQ ID NO: 634 and SEQ ID NO: 635, SEQ ID NO: 636 and SEQ ID NO: 637, SEQ ID NO: 638 and SEQ ID NO: 639, SEQ ID NO: 640 and SEQ ID NO: 641, SEQ ID NO: 642 and SEQ ID NO: 643, SEQ ID NO: 644 and SEQ ID NO: 645, SEQ ID NO: 646 and SEQ ID NO: 647, SEQ ID NO: 648 and SEQ ID NO: 649, SEQ ID NO: 650 and SEQ ID NO: 651, or SEQ ID NO: 652 and SEQ ID NO: 653, respectively, with zero, one, or two single amino acid substitutions in one or more HCDRs or LCDRs.

[0319] Embodiment 21. The multimeric binding molecule of embodiment 20, wherein the HCDR1, HCDR2, HCDR3, LCDR1, LCDR2, and LCDR3 comprise the CDRs of an antibody comprising the VH and VL of SEQ ID NO: 88 and SEQ ID NO: 89.

[0320] Embodiment 22. The multimeric binding molecule of embodiment 20, wherein the HCDR1, HCDR2, HCDR3, LCDR1, LCDR2, and LCDR3 comprise the CDRs of an antibody comprising the VH and VL of SEQ ID NO: 260 and SEQ ID NO: 261.

[0321] Embodiment 23. The multimeric binding molecule of embodiment 20, wherein the HCDR1, HCDR2, HCDR3, LCDR1, LCDR2, and LCDR3 comprise the CDRs of an antibody comprising the VH and VL of SEQ ID NO: 264 and SEQ ID NO: 265.

[0322] Embodiment 24. The multimeric binding molecule of embodiment 20, wherein the HCDR1, HCDR2, HCDR3, LCDR1, LCDR2, and LCDR3 comprise the CDRs of an antibody comprising the VH and VL of SEQ ID NO: 266 and SEQ ID NO: 267.

[0323] Embodiment 25. The multimeric binding molecule of embodiment 20, wherein the HCDR1, HCDR2, HCDR3, LCDR1, LCDR2, and LCDR3 comprise the CDRs of an antibody comprising the VH and VL of SEQ ID NO: 274 and SEQ ID NO: 275, SEQ ID NO: 278, and SEQ ID NO: 279, SEQ ID NO: 280 and SEQ ID NO: 281, or SEQ ID NO: 282 and SEQ ID NO: 283.

[0324] Embodiment 26. The multimeric binding molecule of embodiment 20, wherein the HCDR1, HCDR2, HCDR3, LCDR1, LCDR2, and LCDR3 comprise the CDRs of an antibody comprising the VH and VL of SEQ ID NO: 292 and SEQ ID NO: 293.

[0325] Embodiment 27. The multimeric binding molecule of any one of embodiments 20 to 26, wherein the VH and VL comprise amino acid sequences at least 80%, at least 85%, at least 90%, at least 95% or 100% identical to the recited VH and VL amino acid sequences, respectively.

[0326] Embodiment 28. The multimeric binding molecule of any one of embodiments 20 to 27, wherein the bivalent reference IgG antibody comprising two of the binding domains can neutralize SARS-CoV-2.

[0327] Embodiment 29. The multimeric binding molecule of embodiment 20, wherein the VH and VL comprise six immunoglobulin complementarity determining regions HCDR1, HCDR2, HCDR3, LCDR1, LCDR2, and LCDR3, and wherein the HCDR1, HCDR2, HCDR3, LCDR1, LCDR2, and LCDR3 comprise the CDRs of an antibody comprising the VH and VL of SEQ ID NO: 118 and SEQ ID NO: 119, SEQ ID NO: 162 and SEQ ID NO: 163, SEQ ID NO: 222 and SEQ ID NO: 223, SEQ ID NO: 260 and SEQ ID NO: 261, SEQ ID NO: 296 and SEQ ID NO: 297, SEQ ID NO: 384 and SEQ ID NO: 385, SEQ ID NO: 628 and SEQ ID NO: 629, SEQ ID NO: 632 and SEQ ID NO: 633, SEQ ID NO: 634 and SEQ ID NO: 635, SEQ ID NO: 636 and SEQ ID NO: 637, SEQ ID NO: 638 and SEQ ID NO: 639, SEQ ID NO: 640 and SEQ ID NO: 641, SEQ ID NO: 642 and SEQ ID NO: 643, SEQ ID NO: 644 and SEQ ID NO: 645, or SEQ ID NO: 646 and SEQ ID NO: 647, respectively.

[0328] Embodiment 30. The multimeric binding molecule of embodiment 29, wherein the VH and VL comprise amino acid sequences at least 80%, at least 85%, at least 90%, at least 95% or 100% identical to the recited VH and VL amino acid sequences, respectively.

[0329] Embodiment 31. The multimeric binding molecule of embodiment 29 or embodiment 30, wherein the bivalent reference IgG antibody comprising two of the binding domains can neutralize SARS-CoV-2 and specifically binds to SARS-CoV.

[0330] Embodiment 32. The multimeric binding molecule of embodiment 29, wherein the VH and VL comprise six immunoglobulin complementarity determining regions HCDR1, HCDR2, HCDR3, LCDR1, LCDR2, and LCDR3, and wherein the HCDR1, HCDR2, HCDR3, LCDR1, LCDR2, and LCDR3 comprise the CDRs of an antibody comprising the VH and VL of SEQ ID NO: 260 and SEQ ID NO: 261, SEQ ID NO: 296 and SEQ ID NO: 297, SEQ ID NO: 384 and SEQ ID NO: 385, SEQ ID NO: 628 and SEQ ID NO: 629, SEQ ID NO: 632 and SEQ ID NO: 633, SEQ ID NO: 634 and SEQ ID NO: 635, SEQ ID NO: 636 and SEQ ID NO: 637, SEQ ID NO: 638 and SEQ ID NO: 639, SEQ ID NO: 640 and SEQ ID NO: 641, SEQ ID NO: 642 and SEQ ID NO: 643, SEQ ID NO: 644 and SEQ ID NO: 645, or SEQ ID NO: 646 and SEQ ID NO: 647, respectively.

[0331] Embodiment 33. The multimeric binding protein of embodiment 32, wherein the VH and VL comprise the CDRs of an antibody comprising the VH and VL of SEQ ID NO:384 and SEQ ID NO: 385.

[0332] Embodiment 34. The multimeric binding protein of embodiment 32, wherein the VH and VL comprise the CDRs of an antibody comprising the VH and VL of SEQ ID NO: 646 and SEQ ID NO: 647.

[0333] Embodiment 35. The multimeric binding molecule of any one of embodiments 32 to 34, wherein the VH and VL comprise amino acid sequences at least 80%, at least 85%, at least 90%, at least 95% or 100% identical to the recited VH and VL amino acid sequences, respectively.

[0334] Embodiment 36. The multimeric binding molecule of any one of embodiments 32 to 35, wherein the bivalent reference IgG antibody comprising two of the binding domains can neutralize SARS-CoV and SARS-CoV-2.

[0335] Embodiment 37. The multimeric binding molecule of embodiment 17, wherein the three to twelve identical binding domains each specifically bind to SARS-CoV-2 and comprise a single domain variable region (VHH), wherein the VHH comprises three immunoglobulin complementarity determining regions HCDR1, HCDR2, and HCDR3, wherein the HCDR1, HCDR2, and HCDR3 comprise the CDRs of an antibody comprising the VHH of SEQ ID NO: SEQ ID NO: 19, SEQ ID NO: 20, SEQ ID NO: 21, SEQ ID NO: 22, SEQ ID NO: 23, SEQ ID NO: 24, SEQ ID NO: 25, SEQ ID NO: 26, SEQ ID NO: 27, SEQ ID NO: 28, SEQ ID NO: 29, SEQ ID NO: 30, SEQ ID NO: 31, SEQ ID NO: 32, SEQ ID NO: 33, SEQ ID NO: 34, SEQ ID NO: 35, SEQ ID NO: 36, SEQ ID NO: 37, SEQ ID NO: 38, SEQ ID NO: 39, SEQ ID NO: 40, SEQ ID NO: 41, SEQ ID NO: 42, SEQ ID NO: 43, SEQ ID NO: 44, SEQ ID NO: 45, SEQ ID NO: 46, SEQ ID NO: 47, SEQ ID NO: 48, SEQ ID NO: 49, SEQ ID NO: 50, SEQ ID NO: 51, SEQ ID NO: 52, SEQ ID NO: 53, SEQ ID NO: 54, SEQ ID NO: 55, SEQ ID NO: 56, SEQ ID NO: 57, SEQ ID NO: 58, SEQ ID NO: 59, SEQ ID NO: 60, SEQ ID NO: 61, SEQ ID NO: 62, SEQ ID NO: 63, SEQ ID NO: 64, SEQ ID NO: 65, SEQ ID NO: 66, SEQ ID NO: 67, SEQ ID NO: 68, SEQ ID NO: 69, SEQ ID NO: 70, SEQ ID NO: 71, SEQ ID NO: 72, SEQ ID NO: 73, SEQ ID NO: 74, SEQ ID NO: 75, SEQ ID NO: 76, SEQ ID NO: 77, SEQ ID NO: 78, SEQ ID NO: 79, SEQ ID NO: 80, SEQ ID NO: 81, SEQ ID NO: 82, or SEQ ID NO:83, with zero, one, or two single amino acid substitutions in one or more of the HCDRs.

[0336] Embodiment 38. The multimeric binding molecule of embodiment 37, wherein the VHH comprises an amino acid sequence at least 80%, at least 85%, at least 90%, at least 95% or 100% identical to the recited VHH amino acid sequence.

[0337] Embodiment 39. The multimeric binding molecule of any one of embodiments 1 to 11, wherein the three to twelve identical binding domains of the multimeric binding molecule that specifically bind to a human coronavirus comprise an extracellular SARS-CoV-2 RBD-binding fragment of angiotensin-converting enzyme 2 (ACE2).

[0338] Embodiment 40. The multimeric binding molecule of any one of embodiments 1 to 16, wherein the human coronavirus is SARS-CoV.

[0339] Embodiment 41. The multimeric binding molecule of embodiment 40, wherein the three to twelve identical binding domains each specifically bind to SARS-CoV and comprise a heavy chain variable region (VH) and a light chain variable region (VL), wherein the VH and VL comprise six immunoglobulin complementarity determining regions HCDR1, HCDR2, HCDR3, LCDR1, LCDR2, and LCDR3, and wherein the HCDR1, HCDR2, HCDR3, LCDR1, LCDR2, and LCDR3 comprise the CDRs of an antibody comprising the VH and VL SEQ ID NO: 84 and SEQ ID NO: 85, SEQ ID NO: 118 and SEQ ID NO: 119, SEQ ID NO: 120 and SEQ ID NO: 121, SEQ ID NO: 138 and SEQ ID NO: 139, SEQ ID NO: 162 and SEQ ID NO: 163, SEQ ID NO: 222 and SEQ ID NO: 223, SEQ ID NO: 236 and SEQ ID NO: 237, SEQ ID NO: 252 and SEQ ID NO: 253, SEQ ID NO: 260 and SEQ ID NO: 261, SEQ ID NO: 262 and SEQ ID NO: 263, SEQ ID NO: 296 and SEQ ID NO: 297, SEQ ID NO: 628 and SEQ ID NO: 629, SEQ ID NO: 632 and SEQ ID NO: 633, SEQ ID NO: 634 and SEQ ID NO: 635, SEQ ID NO: 636 and SEQ ID NO: 637, SEQ ID NO: 638 and SEQ ID NO: 639, SEQ ID NO: 640 and SEQ ID NO: 641, SEQ ID NO: 642 and SEQ ID NO: 643, or SEQ ID NO: 644 and SEQ ID NO: 645.

[0340] Embodiment 42. The multimeric binding molecule of embodiment 41, wherein the VH and VL comprise amino acid sequences at least 80%, at least 85%, at least 90%, at least 95% or 100% identical to the recited VH and VL amino acid sequences, respectively.

[0341] Embodiment 43. The multimeric binding molecule of embodiment 41, wherein the VH and VL comprise six immunoglobulin complementarity determining regions HCDR1, HCDR2, HCDR3, LCDR1, LCDR2, and LCDR3, wherein the HCDR1, HCDR2, HCDR3, LCDR1, LCDR2, and LCDR3 comprise the CDRs of an antibody comprising the VH and VL of SEQ ID NO: 84 and SEQ ID NO: 85, SEQ ID NO: 260 and SEQ ID NO: 261, SEQ ID NO: 262 and SEQ ID NO: 263, SEQ ID NO: 296 and SEQ ID NO: 297, SEQ ID NO: 628 and SEQ ID NO: 629, SEQ ID NO: 632 and SEQ ID NO: 633, SEQ ID NO: 634 and SEQ ID NO: 635, SEQ ID NO: 636 and SEQ ID NO: 637, SEQ ID NO: 638 and SEQ ID NO: 639, SEQ ID NO: 640 and SEQ ID NO: 641, SEQ ID NO: 642 and SEQ ID NO: 643, or SEQ ID NO: 644 and SEQ ID NO: 645.

[0342] Embodiment 44. The multimeric binding molecule of embodiment 43, wherein the VH and VL comprise amino acid sequences at least 80%, at least 85%, at least 90%, at least 95% or 100% identical to the recited VH and VL amino acid sequences, respectively.

[0343] Embodiment 45. The multimeric binding molecule of embodiment 43 or embodiment 44, wherein the bivalent reference IgG antibody comprising two of the binding domains can neutralize SARS-CoV.

[0344] Embodiment 46. The multimeric binding molecule of any one of embodiments 1 to 16, wherein the human coronavirus is MERS-CoV.

[0345] Embodiment 47. The multimeric binding molecule of embodiment 46, wherein the three to twelve identical binding domains each specifically bind to MERS-CoV and comprise a heavy chain variable region (VH) and a light chain variable region (VL), wherein the VH and VL comprise six immunoglobulin complementarity determining regions HCDR1, HCDR2, HCDR3, LCDR1, LCDR2, and LCDR3, and wherein the HCDR1, HCDR2, HCDR3, LCDR1, LCDR2, and LCDR3 comprise the CDRs of an antibody comprising the VH and VL SEQ ID NO:510 and SEQ ID NO:511, SEQ ID NO:512 and SEQ ID NO:513, SEQ ID NO:514 and SEQ ID NO:515, SEQ ID NO:516 and SEQ ID NO:517, SEQ ID NO:518 and SEQ ID NO:519, SEQ ID NO:520 and SEQ ID NO:521, SEQ ID NO:522 and SEQ ID NO:523, SEQ ID NO:524 and SEQ ID NO:525, SEQ ID NO:526 and SEQ ID NO:527, SEQ ID NO:528 and SEQ ID NO:529, SEQ ID NO:530 and SEQ ID NO:531, SEQ ID NO:532 and SEQ ID NO:533, SEQ ID NO:534 and SEQ ID NO:535, SEQ ID NO:536 and SEQ ID NO:537, SEQ ID NO:538 and SEQ ID NO:539, SEQ ID NO:540 and SEQ ID NO:541, SEQ ID NO:542 and SEQ ID NO:543, SEQ ID NO:544 and SEQ ID NO:545, SEQ ID NO:546 and SEQ ID NO:547, SEQ ID NO:548 and SEQ ID NO:549, SEQ ID NO:550 and SEQ ID NO:551, SEQ ID NO:552 and SEQ ID NO:553, SEQ ID NO:554 and SEQ ID NO:555, SEQ ID NO:556 and SEQ ID NO:557, SEQ ID NO:558 and SEQ ID NO:559, SEQ ID NO:560 and SEQ ID NO:561, SEQ ID NO:562 and SEQ ID NO:563, SEQ ID NO:564 and SEQ ID NO:565, SEQ ID NO:566 and SEQ ID NO:567, SEQ ID NO:568 and SEQ ID NO:569, SEQ ID NO:570 and SEQ ID NO:571, SEQ ID NO:572 and SEQ ID NO:573, SEQ ID NO:574 and SEQ ID NO:575, SEQ ID NO:576 and SEQ ID NO:577, SEQ ID NO:578 and SEQ ID NO:579, SEQ ID NO:580 and SEQ ID NO:581, SEQ ID NO:582 and SEQ ID NO:583, SEQ ID NO:584 and SEQ ID NO:585, SEQ ID NO:586 and SEQ ID NO:587, SEQ ID NO:588 and SEQ ID NO:589, SEQ ID NO:590 and SEQ ID NO:591, SEQ ID NO:592 and SEQ ID NO:593, SEQ ID NO:594 and SEQ ID NO:595, SEQ ID NO:596 and SEQ ID NO:597, SEQ ID NO:598 and SEQ ID NO:599, SEQ ID NO:600 and SEQ ID NO:601, SEQ ID NO:602 and SEQ ID NO:603, SEQ ID NO:604 and SEQ ID NO:605, SEQ ID NO:606 and SEQ ID NO:607, SEQ ID NO:608 and SEQ ID NO:609, SEQ ID NO:610 and SEQ ID NO:611, SEQ ID NO:612 and SEQ ID NO:613, SEQ ID NO:614 and SEQ ID NO:615, SEQ ID NO:616 and SEQ ID NO:617, SEQ ID NO:618 and SEQ ID NO:619, SEQ ID NO:620 and SEQ ID NO:621, SEQ ID NO:622 and SEQ ID NO:623, SEQ ID NO:624 and SEQ ID NO:625, SEQ ID NO:626 and SEQ ID NO:627, or SEQ ID NO:630 and SQ ID NO:631, respectively, with zero, one, or two single amino acid substitutions in one or more of the HCDRs or LCDRs.

[0346] Embodiment 48. The multimeric binding molecule of embodiment 47, wherein the VH and VL comprise amino acid sequences at least 80%, at least 85%, at least 90%, at least 95% or 100% identical to the recited VH and VL amino acid sequences, respectively.

[0347] Embodiment 49. The multimeric binding molecule of any of embodiment 47, wherein the HCDR1, HCDR2, HCDR3, LCDR1, LCDR2, and LCDR3 comprise the CDRs of an antibody comprising the VH and VL of SEQ ID NO: 510 and SEQ ID NO: 511, SEQ ID NO: 512 and SEQ ID NO: 513, SEQ ID NO: 514 and SEQ ID NO: 515, SEQ ID NO: 516 and SEQ ID NO: 517, SEQ ID NO: 518 and SEQ ID NO: 519, SEQ ID NO: 520 and SEQ ID NO: 521, SEQ ID NO: 522 and SEQ ID NO: 523, SEQ ID NO: 524 and SEQ ID NO: 525, SEQ ID NO: 526 and SEQ ID NO: 527, SEQ ID NO: 528 and SEQ ID NO: 529, SEQ ID NO: 530 and SEQ ID NO: 531, SEQ ID NO: 532 and SEQ ID NO: 533, SEQ ID NO: 534 and SEQ ID NO: 535, SEQ ID NO: 536 and SEQ ID NO: 537, SEQ ID NO: 538 and SEQ ID NO: 539, SEQ ID NO: 540 and SEQ ID NO: 541, SEQ ID NO: 542 and SEQ ID NO: 543, SEQ ID NO: 544 and SEQ ID NO: 545, SEQ ID NO: 546 and SEQ ID NO: 547, SEQ ID NO: 548 and SEQ ID NO: 549, SEQ ID NO: 550 and SEQ ID NO: 551, SEQ ID NO: 552 and SEQ ID NO: 553, SEQ ID NO: 554 and SEQ ID NO: 555, SEQ ID NO: 556 and SEQ ID NO: 557, SEQ ID NO: 558 and SEQ ID NO: 559, SEQ ID NO: 560 and SEQ ID NO: 561, SEQ ID NO: 562 and SEQ ID NO: 563, SEQ ID NO: 564 and SEQ ID NO: 565, SEQ ID NO: 566 and SEQ ID NO: 567, SEQ ID NO: 568 and SEQ ID NO: 569, SEQ ID NO: 574 and SEQ ID NO: 575, SEQ ID NO: 576 and SEQ ID NO: 577, SEQ ID NO: 578 and SEQ ID NO: 579, SEQ ID NO: 580 and SEQ ID NO: 581, SEQ ID NO: 582 and SEQ ID NO: 583, SEQ ID NO: 584 and SEQ ID NO: 585, SEQ ID NO: 586 and SEQ ID NO: 587, SEQ ID NO: 588 and SEQ ID NO: 589, SEQ ID NO: 590 and SEQ ID NO: 591, SEQ ID NO: 592 and SEQ ID NO: 593, SEQ ID NO: 594 and SEQ ID NO: 595, SEQ ID NO: 596 and SEQ ID NO: 597, SEQ ID NO: 598 and SEQ ID NO: 599, SEQ ID NO: 600 and SEQ ID NO: 601, SEQ ID NO: 602 and SEQ ID NO: 603, SEQ ID NO: 604 and SEQ ID NO: 605, SEQ ID NO: 606 and SEQ ID NO: 607, SEQ ID NO: 608 and SEQ ID NO: 609, SEQ ID NO: 610 and SEQ ID NO: 611, SEQ ID NO: 612 and SEQ ID NO: 613, SEQ ID NO: 614 and SEQ ID NO: 615, SEQ ID NO: 616 and SEQ ID NO: 617, SEQ ID NO: 618 and SEQ ID NO: 619, SEQ ID NO: 620 and SEQ ID NO: 621, SEQ ID NO: 622 and SEQ ID NO: 623, SEQ ID NO: 624 and SEQ ID NO: 625, SEQ ID NO: 626 and SEQ ID NO: 627, or SEQ ID NO: 630 and SEQ ID NO: 631, respectively.

[0348] Embodiment 50. The multimeric binding molecule of any of embodiment 49, wherein the HCDR1, HCDR2, HCDR3, LCDR1, LCDR2, and LCDR3 comprise the CDRs of an antibody comprising the VH and VL of SEQ ID NO: 522 and SEQ ID NO: 523, SEQ ID NO: 576 and SEQ ID NO: 577, SEQ ID NO: 610 and SEQ ID NO: 611, SEQ ID NO: 612 and SEQ ID NO: 613, SEQ ID NO: 614 and SEQ ID NO: 615, or SEQ ID NO: 630 and SEQ ID NO: 631, respectively.

[0349] Embodiment 51. The multimeric binding molecule of embodiment 49 or embodiment 50, wherein the VH and VL comprise amino acid sequences at least 80%, at least 85%, at least 90%, at least 95% or 100% identical to the recited VH and VL amino acid sequences, respectively.

[0350] Embodiment 52. The multimeric binding molecule of any one of embodiments 49 to 51, wherein the bivalent reference IgG antibody comprising two of the binding domains can neutralize MERS-CoV.

[0351] Embodiment 53. The multimeric binding molecule of embodiment 46, wherein the three to twelve identical binding domains of the multimeric binding molecule comprise an extracellular MERS-CoV RBD-binding fragment of dipeptidyl peptidase 4 (DPP4).

[0352] Embodiment 54. The multimeric binding molecule of any one of embodiments 1 to 53, which can neutralize escape mutants of the bivalent reference IgG antibody comprising two of the binding domains.

[0353] Embodiment 55. The multimeric binding molecule of any one of embodiments 1 to 54, comprising two or four bivalent IgA or IgA-like binding units and a J chain or functional fragment or variant thereof, wherein each binding unit comprises two IgA heavy chain constant regions or multimerizing fragments or variants thereof, each comprising an IgA Cα3 domain and an IgA tailpiece domain.

[0354] Embodiment 56. The multimeric binding molecule of embodiment 55, which is a dimeric binding molecule comprising two bivalent IgA or IgA-like binding units.

[0355] Embodiment 57. The multimeric binding molecule of embodiment 55 or embodiment 56, wherein each IgA heavy chain constant region or multimerizing fragment or variant thereof further comprises a Cα1 domain, a Cα2 domain, an IgA hinge region, or any combination thereof.

[0356] Embodiment 58. The multimeric binding molecule of any one of embodiments 55 to 57, wherein the IgA heavy chain constant regions or multimerizing fragments or variants thereof are human IgA constant regions.

[0357] Embodiment 59. The multimeric binding molecule of any one of embodiments 55 to 58, wherein each binding unit comprises two IgA heavy chains each comprising a VH situated amino terminal to the IgA constant region or multimerizing fragment thereof, and two immunoglobulin light chains each comprising a VL situated amino terminal to an immunoglobulin light chain constant region.

[0358] Embodiment 60. The multimeric binding molecule of any one of embodiments 1 to 54, comprising five or six bivalent IgM or IgM-like binding units, wherein each binding unit comprises two IgM heavy chain constant regions or multimerizing fragments or variants thereof, each comprising an IgM Cμ4 and IgM tailpiece domain.

[0359] Embodiment 61. The multimeric binding molecule of embodiment 60, wherein each IgM heavy chain constant region or multimerizing fragment or variant thereof further comprises a Cμ1 domain, a Cμ2 domain, a Cμ3 domain, or any combination thereof.

[0360] Embodiment 62. The multimeric binding molecule of embodiment 60 or embodiment 61, wherein the IgM heavy chain constant regions or multimerizing fragments or variants thereof are human IgM constant regions.

[0361] Embodiment 63. The multimeric binding molecule of embodiment 62, wherein the IgM heavy chain constant regions each comprise the amino acid sequence SEQ ID NO: 1, SEQ ID NO: 2, or a multimerizing fragment or variant thereof.

[0362] Embodiment 64. The multimeric binding molecule of any one of embodiments 60 to 63, wherein each binding unit comprises two IgM heavy chains each comprising a VH situated amino terminal to the IgM constant region or fragment thereof, and two immunoglobulin light chains each comprising a VL situated amino terminal to an immunoglobulin light chain constant region.

[0363] Embodiment 65. The multimeric binding molecule of any one of embodiments 60 to 63, wherein the IgM constant regions each comprise one or more amino acid substitutions corresponding to a wild-type human IgM constant region at position 310, 311, 313, and/or 315 of SEQ ID NO: 1 or SEQ ID NO: 2, and wherein the multimeric binding molecule exhibits reduced complement-dependent cytotoxicity (CDC) activity to cells in the presence of complement, relative to a reference binding molecule that is identical except for the one or more amino acid substitutions.

[0364] Embodiment 66. The multimeric binding molecule of any one of embodiments 60 to 64, wherein the IgM constant regions each comprise one or more substitutions corresponding to a wild-type human IgM constant region at positions 46, 209, 272, or 440 of SEQ ID NO: 1 or SEQ ID NO: 2, wherein the one or more amino acid substitutions prevent asparagine (N)-linked glycosylation.

[0365] Embodiment 67. The multimeric binding molecule of any one of embodiments 60 to 66 which is pentameric, and further comprises a J-chain or functional fragment or variant thereof.

[0366] Embodiment 68. The multimeric binding molecule of any one of embodiments 55 to 59 or 67, which can transport across vascular endothelial cells via J-chain binding to the polymeric Ig receptor (PIgR).

[0367] Embodiment 69. The multimeric binding molecule of any one of embodiments 55 to 59 or 67, further comprising a secretory component, or fragment or variant thereof.

[0368] Embodiment 70. The multimeric binding molecule of any one of embodiments 55 to 59 or 67 to 69, wherein the J-chain or functional fragment or variant thereof further comprises a heterologous polypeptide, wherein the heterologous polypeptide is directly or indirectly fused to the J-chain or functional fragment or variant thereof.

[0369] Embodiment 71. The multimeric binding molecule of embodiment 70, wherein the heterologous polypeptide is fused to the J-chain or fragment thereof via a peptide linker.

[0370] Embodiment 72. The multimeric binding molecule of embodiment 71, wherein the peptide linker comprises at least 5 amino acids, but no more than 25 amino acids.

[0371] Embodiment 73. The multimeric binding molecule of embodiment 71 or 72, wherein the peptide linker consists of GGGGS (SEQ ID NO: 9), GGGGSGGGGS (SEQ ID NO: 10), GGGGSGGGGSGGGGS (SEQ ID NO: 11), GGGGSGGGGSGGGGSGGGGS (SEQ ID NO: 12), or GGGGSGGGGSGGGGSGGGGSGGGGS (SEQ ID NO: 13).

[0372] Embodiment 74. The multimeric binding molecule of any one of embodiments 70 to 73, wherein the heterologous polypeptide is fused to the N-terminus of the J-chain or fragment or variant thereof, the C-terminus of the J-chain or fragment or variant thereof, or to both the N-terminus and C-terminus of the J-chain or fragment or variant thereof.

[0373] Embodiment 75. The multimeric binding molecule of any one of embodiments 70 to 74, wherein the heterologous polypeptide can influence the absorption, distribution, metabolism and/or excretion (ADME) of the multimeric binding molecule.

[0374] Embodiment 76. The multimeric binding molecule of any one of embodiments 70 to 75, wherein the heterologous polypeptide comprises an albumin or an albumin binding domain.

[0375] Embodiment 77. The multimeric binding molecule of any one of embodiments 70 to 76, wherein the heterologous polypeptide comprises human serum albumin.

[0376] Embodiment 78. The multimeric binding molecule of any one of embodiments 70 to 77, wherein the heterologous polypeptide comprises an antigen binding domain.

[0377] Embodiment 79. The multimeric binding molecule of embodiment 78, wherein the antigen binding domain binds to the human coronavirus.

[0378] Embodiment 80. The multimeric binding molecule of embodiment 79, wherein the antigen binding domain binds to a different epitope of the human coronavirus than the three to twelve identical binding domains of the multimeric binding molecule that specifically bind to the human coronavirus.

[0379] Embodiment 81. The multimeric binding molecule of any one of embodiments 78 to 80, wherein the antigen binding domain of the heterologous polypeptide is an antibody or antigen-binding fragment thereof.

[0380] Embodiment 82. The multimeric binding molecule of embodiment 81, wherein the antigen-binding fragment comprises a Fab fragment, a Fab′ fragment, a F(ab′)2 fragment, a Fd fragment, a Fv fragment, a single-chain Fv (scFv) fragment, a disulfide-linked Fv (sdFv) fragment, or any combination thereof.

[0381] Embodiment 83. The multimeric binding molecule of embodiment 81 or embodiment 82, wherein the antigen-binding fragment is a scFv fragment.

[0382] Embodiment 84. The multimeric binding molecule of any one of embodiments 70 to 74, wherein the heterologous polypeptide comprises an extracellular SARS-CoV-2 RBD-binding fragment of angiotensin-converting enzyme 2 (ACE2).

[0383] Embodiment 85. The multimeric binding molecule of any one of embodiments 70 to 74, wherein the heterologous polypeptide comprises an extracellular MERS-COV RBD-binding fragment of dipeptidyl peptidase 4 (DPP4).

[0384] Embodiment 86. The multimeric binding molecule of any one of embodiments 74 to 85, wherein the J-chain or functional fragment or variant thereof further comprises an additional heterologous polypeptide, wherein the additional heterologous polypeptide is directly or indirectly fused to the J-chain or functional fragment or variant thereof.

[0385] Embodiment 87. The multimeric binding molecule of embodiment 86, wherein the additional heterologous polypeptide can influence the absorption, distribution, metabolism and/or excretion (ADME) of the multimeric binding molecule.

[0386] Embodiment 88. The multimeric binding molecule of embodiment 86 or embodiment 87, wherein the additional heterologous polypeptide comprises an albumin or an albumin binding protein.

[0387] Embodiment 89. The multimeric binding molecule of embodiment 88, wherein the additional heterologous polypeptide comprises human serum albumin.

[0388] Embodiment 90. A composition comprising the multimeric binding molecule of any one of embodiments 1 to 89.

[0389] Embodiment 91. A composition comprising two or more nonidentical multimeric binding molecules according to any one of embodiments 1 to 89, wherein the two or more multimeric binding molecules bind to different epitopes of a single human coronavirus.

[0390] Embodiment 92. A polynucleotide comprising a nucleic acid sequence that encodes a polypeptide subunit of the binding molecule of any one of embodiments 1 to 89.

[0391] Embodiment 93. A vector comprising the polynucleotide of embodiment 92.

[0392] Embodiment 94. A host cell comprising the polynucleotide of embodiment 92, or the vector of embodiment 93, wherein the host cell can express the multimeric binding molecule of any one of embodiments 1 to 89, or a subunit thereof.

[0393] Embodiment 95. A method of producing the multimeric binding molecule of any one of embodiments 1 to 89, comprising culturing the host cell of embodiment 94, and recovering the multimeric binding molecule.

[0394] Embodiment 96. The method of embodiment 95, further comprising contacting the multimeric binding molecule with a secretory component, or fragment or variant thereof.

[0395] Embodiment 97. A method for treating a human coronavirus disease in a subject in need of treatment comprising administering to the subject an effective amount of the multimeric binding molecule of any one of embodiments 1 to 89, wherein the multimeric binding molecule exhibits greater potency than an equivalent amount of a bivalent reference IgG antibody comprising two of the binding domains that specifically bind to the human coronavirus.

[0396] Embodiment 98. A method for preventing a human coronavirus disease in a subject, comprising administering to the subject an effective amount of the multimeric binding molecule of any one of embodiments 1 to 89, wherein the multimeric binding molecule exhibits greater potency than an equivalent amount of a bivalent reference IgG antibody comprising two of the binding domains that specifically bind to the human coronavirus.

[0397] Embodiment 99. The method of embodiment 97 or embodiment 98, wherein the human coronavirus disease is severe acute respiratory syndrome (SARS).

[0398] Embodiment 100. The method of embodiment 97 or embodiment 98, wherein the human coronavirus disease is coronavirus disease 2019 (COVID-19).

[0399] Embodiment 101. The method of embodiment 97 or embodiment 98, wherein the human coronavirus disease is Middle East Respiratory Syndrome (MERS).

[0400] Embodiment 102. The method of any one of embodiments 97 to 101, wherein the subject is human.

[0401] Embodiment 103. The method of any one of embodiments 97 to 102, wherein the administering comprises intravenous, subcutaneous, intramuscular, intranasal, and/or inhalation administration.

### EXAMPLES

### Example 1: Generation of Antibodies to SARS-CoV-1 and SARS-CoV-2

[0402] The VH and VL regions of two anti-SARS-CoV-1 antibodies, CR3022 and CR3014 (US20060121580), were incorporated into IgM, IgA1, and IgA2m2 formats (each with an exemplary J-chain, SEQ ID NO: 7) and IgG format according to standard cloning protocols. CR3022 IgG is known to bind SARS-CoV-2 and CR3014 IgG does not. CR3022 constructs included the VH and VL amino acid sequences SEQ ID NO: 84 and SEQ ID NO: 85, respectively, and CR3014 constructs included the VH and VL amino acid sequences SEQ ID NO: 262 and SEQ ID NO: 263, respectively.

[0403] The IgM and IgG antibody constructs were expressed and purified according to methods described in WO2017196867. The IgA antibody constructs were expressed using the same methods described in WO2017196867 as the IgM antibody constructs, except that the appropriate IgA heavy chain was used. The IgM antibodies assembled as pentamers with a J-chain, and the IgA antibodies assembled as dimers and/or tetramers with a J-chain (data not shown).

### Example 2: Antibody Binding Measured by ELISA

[0404] CR3022 was originally developed as an anti-SARS-CoV-1 IgG antibody (US20060121580) and CR3022 IgG has recently been demonstrated to also bind SARS-CoV-2 (Tian et al. Emerging Microbes & Infections, 2020, doi: 10.1080/22221751.2020.1729069). ELISA was used to determine how the IgM, IgA1, IgA2m2, and IgG1 formats affect binding to SARS-CoV-1 and SARS-CoV-2.

[0405] Binding of CR3022 IgM, IgA1, IgA2m2, and IgG (described in Example 1) to SARS-CoV-1 and SARS-CoV-2 was measured in ELISA assays as follows. 96-well white polystyrene ELISA plates (Pierce 15042) were coated with 100 μL per well of 0.5 μg/mL recombinant SARS-CoV-1 Receptor Binding Domain (RBD) with a his tag, recombinant SARS-CoV-2 RBD with a his tag, recombinant SARS-CoV-2 RBD with a Fc tag, or recombinant SARS-CoV-2 spike (S) protein trimer, overnight at 4° C. Plates were then washed 5 times with 0.05% PBS-Tween and blocked with 2% BSA-PBS. After blocking, 100 μL of serial dilutions of CR3022 IgM, IgA1, IgA2m2, or IgG; standards; or controls were added to the wells and incubated at room temperature for 2 hours. The plates were then washed 10 times and incubated with HRP conjugated mouse anti-human kappa (Southern Biotech, 9230-05; 1:6000 diluted in 2% BSA-PBS) for 30 min. After 10 final washes using 0.05% PBS-Tween, the plates were read out using SuperSignal chemiluminescent substrate (ThermoFisher, 37070). Luminescent data were collected on an EnVision plate reader (Perkin-Elmer) and analyzed with GraphPad Prism using a 4-parameter logistic model. Binding to SARS-CoV-1 RBD is shown in FIG. 1A, and binding to SARS-CoV-2 RBD is shown in FIG. 1B. Similar binding profiles were seen with SARS-CoV-2 RBD his tag, SARS-CoV-2 Fc, and SARS-CoV-2 S trimer.

### Example 3: Pseudovirus Neutralization Assay

[0406] CR3022 IgG and CR3014 IgG have both been reported to neutralize SARS-CoV-1 (US20060121580). CR3014 IgG does not bind SARS-CoV-2 RBD whereas CR3022 IgG does bind SARS-CoV-2 RBD (Tian et al., Emerging Microbes & Infections, doi: 10.1080/22221751.2020.1729069, 2020). However, there has been disagreement whether CR3022 IgG is capable of neutralizing SARS-CoV-2 (Yuan et al., Science 10.1126/science.abb7269; 2020), Huo et al., Cell Host Microbe, doi: 10.1016/j.chom.2020.06.010, 2020). A pseudovirus neutralization assay was used to determine how the IgM, IgA1, IgA2m2, and IgG1 formats affect neutralization of pseudoviruses comprising the SARS-CoV-1 or SARS-CoV-2 spike protein.

[0407] A SARS-CoV pseudovirus neutralization assay was performed generally as described in Richman et al. (PNAS, 2003, 100(7): 4144-4149), wherein host cells that have been infected with an HIV-based pseudovirus express luciferase. In the SARS-CoV-1 or SARS-CoV-2 pseudovirus neutralization assay, the pseudovirus was engineered to express SARS-CoV-1 or SARS-CoV-2 spike proteins in place of HIV gp160. Various concentrations of CR3022 IgG1, IgA1, IgA2m2, or IgM or CR3014 IgG1 and IgM were incubated with the SARS-CoV-1 or SARS-CoV-2 pseudovirus for 1 hr. at 37° C. HEK-293 cells expressing human ACE-2 were then inoculated with the antibody/pseudovirus solution. The amount of luciferase activity in the infected cells was measured 72 h post-inoculation to determine the neutralizing activity. A decrease in luciferase activity indicated neutralizing activity by the antibody assayed. Neutralizing activity was calculated as the percent inhibition of viral replication (luciferase activity) at each antibody dilution compared with an antibody-negative control. The percent inhibitions of the SARS-CoV-1 pseudovirus for CR3022 IgG1, CR3022 IgA1, CR3022 IgA2m2, CR3022 IgM, CR3014 IgG1, and CR3014 IgM are shown in FIGS. 2A-2F, respectively. Neither CR3022 nor CR3014, in any format, neutralized SARS-CoV-2 pseudovirus infectivity. In contrast, all forms of CR3022 and CR3014 neutralized SARS-CoV-1, with the IgM and IgA forms being the most potent. The IC₅₀ and fold improvement over IgG1 for each IgA and IgM antibody are shown in Table 2. CR3022 is ˜6-fold more potent as an IgM than as an IgG1 in neutralizing SARS-CoV-1 pseudovirus on a weight basis, and CR3014 is at least 13-fold more potent as an IgM than as an IgG.

TABLE 2
Pseudovirus Neutralization Results

| | IC₅₀ (μg/mL) | | Fold Over IgG1 (CoV-1) | |
|---|---|---|---|---|
| | SARS- | SARS- | By | By |
| Antibody | CoV-1 | CoV-2 | Weight | Molar |
| CR3022-IgG1 | 2.9 | >100,000 | 1.0 | 1.0 |
| CR3022-IgA1 + J | 1.9 | >100,000 | 1.5 | 3.4 |
| CR3022-IgA2m2 + J | 2.3 | >100,000 | 1.3 | 2.8 |
| CR3022-IgM + J | 0.47 | >100,000 | 6.2 | 37 |
| CR3014-IgG1 | 0.068 | >100,000 | 1.0 | 1.0 |
| CR3014-IgM + J | <0.0051 | >100,000 | >13 | >80 |

### Example 4: Antibody Transcytosis

[0408] To determine if CR3022 IgA1, IgA2, and IgM antibodies are capable of functionally interacting with the polymeric immunoglobulin receptor (pIgR) and being transcytosed across a cell barrier, an in vitro transcytosis assay was developed, modified from the transcytosis assay describe by Chung et al. (2019, mAbs, 11(5): 942-955).

[0409] MDCK.2 (Sigma) cells were transfected to express human pIgR. The hpIgR-expressing MDCK.2 cells were seeded at a density of 1×10⁵ cells/well in growth medium (DMEM High Glucose supplemented with 10% FBS) in a 96-well trans-well plate and were incubated for 48 hours at 37° C. The transwell insert and corresponding monolayer of cells were transferred to a receiver plate in which the basolateral chamber contained 11.1, 33.3, or 100 μg/mL of CR3022 IgA1, IgA2, or IgM antibodies in growth medium. A human IgG antibody was also included as a control. The cells were incubated at 37° C. for another 24 hours. The media from the apical chamber were then collected and the amount of transcytosed molecules was determined by ELISA. The resulting concentrations for each antibody format are shown in FIG. 3. CR3022 IgA1, IgA2 and IgM antibodies were efficiently transcytosed across the cell monolayer, whereas the IgG antibody was not.

### Example 5: Additional SARS-CoV-2 Antibody Generation

[0410] The VH and VL regions of eight anti-SARS-CoV-2 antibodies were incorporated into IgM with an exemplary J-chain, SEQ ID NO: 7 and IgG format according to standard cloning protocols. The VH and VL amino acid sequences used for each antibodies construct are shown in Table 3.

TABLE 3
Antibody Constructs Generated

SEQ ID NO

| | VH | VL |
|---|---|---|
| Ab1 | 88 | 89 |
| Ab2 | 260 | 261 |
| Ab3 | 264 | 265 |
| Ab4 | 266 | 267 |
| Ab5 | 284 | 285 |
| Ab6 | 286 | 287 |
| Ab7 | 288 | 289 |
| Ab8 | 290 | 291 |
| Ab9 | 292 | 293 |
| Ab10 | 274 | 275 |
| Ab11 | 278 | 279 |
| Ab12 | 280 | 281 |
| Ab13 | 282 | 283 |

[0411] The IgM antibodies were purified according to methods described in Keyt, B., et al. Antibodies: 9:53, doi: 10.3390/antib9040053 (2020), or, e.g., as described in WO2017196867. The IgA and IgG antibodies were purified by affinity chromatography. The IgM antibodies assembled as pentamers with a J-chain and the IgG antibodies properly assembled as monomers (data not shown).

### Example 6: Antibody Binding to SARS-CoV-2 Measured by ELISA

[0412] ELISA was used to determine how the IgM and IgG1 formats affect binding to SARS-CoV-2. Binding of Ab1-Ab4 IgM and IgG (described in Example 5) to SARS-CoV-2 was measured in ELISA assays as follows. 96-well white polystyrene ELISA plates (Pierce 15042) were coated with 100 μL per well of 0.5 μg/mL recombinant SARS-CoV-2 RBD with a HIS tag (for Ab1-Ab4) or S protein trimer (for Ab10-Ab13) overnight at 4° C. Plates were then washed 5 times with 0.05% PBS-Tween and blocked with 2% BSA-PBS. After blocking, 100 μL of serial dilutions of IgM or IgG antibodies, standards, or controls were added to the wells and incubated at room temperature for 2 hours. The plates were then washed 10 times and incubated with HRP conjugated mouse anti-human kappa (Southern Biotech, 9230-05; 1:6000 diluted in 2% BSA-PBS) or mouse anti-human lambda (clone JDC-12, Southern Biotech, 9180-05; 1:6000 diluted in 2% BSA-PBS) for 30 min. After 10 final washes using 0.05% PBS-Tween, the plates were read out using SuperSignal chemiluminescent substrate (ThermoFisher, 37070). Luminescent data were collected on an EnVision plate reader (PerkinElmer) and analyzed with GraphPad Prism using a 4-parameter logistic model. Binding of Ab1-Ab4 to SARS-CoV-2 RBD is shown in FIGS. 4A-4D, respectively. Binding of Ab10, Ab11, and Ab13 to SARS-CoV-2 S protein trimer is shown in FIGS. 4E-4G, respectively.

[0413] For Ab1-Ab4, Ab10, Ab11, and Ab13, both the IgG and IgM versions bound well to the SARS-CoV-2 RBD or S trimer but, in each case, the IgM bound much better than the IgG. Ab12 poorly bound the S trimer in both the IgG and IgM formats (data not shown).

### Example 7: SARS-CoV-2 Neutralization Assay

[0414] A SARS-CoV-2 live virus microneutralization assay was performed generally as described in Graham et al. (Clin Transl Immunology, 2020, 9(10):e1189, doi: 10.1002/cti2.1189.) using a focus reduction microneutralization test (FRNT) with various concentrations of antibodies. Specifically, the neutralizing activity of IgG1 and IgM versions of Ab1-Ab9 were assessed in vitro. Antibodies were combined with focus forming units of SARS-CoV-2 and incubated for 60 minutes at 37° C. and then assayed undiluted and in serial dilutions until reaching an endpoint of 1:3200. Samples were applied to confluent cell monolayers in 96 well plates and were incubated for 60 minutes at 37° C., followed by overlaying the wells with 1.2% methylcellulose in cDMEM and incubation at 37° C., 5% CO₂ for 24 hours. Infected cells were fixed in 25% formaldehyde in 3×PBS, then permeabilized with 0.1% Triton in 1×PBS for 15 minutes and then incubated with a primary anti-SARS-CoV monoclonal antibody, and then a secondary detectable antibody. Cell levels were counted using established methods. IC₅₀ determinations were made using a non-linear regression curve fit (log [inhibitor] vs. normalized response−variable slope) in GraphPad Prism. The IC₅₀ and fold improvement over IgG1 for each antibody are shown in Table 4.

TABLE 4
Neutralization Results

| | IgM IC₅₀ | IgG IC₅₀ | IgM Fold Improvement |
|---|---|---|---|
| | (ng/mL) | (ng/mL) | Over IgG1 |
| Ab1 | 13 | 130 | 10 |
| Ab2 | 50 | 92 | 1.8 |
| Ab3 | 3.8 | 11 | 2.9 |
| Ab4 | 3.1 | 180 | 59 |
| Ab5 | 11 | 70 | 6.2 |
| Ab6 | 41 | 2800 | 68 |
| Ab7 | 1.6 | 30 | 19 |
| Ab8 | 28 | 93 | 3.3 |
| Ab9 | 1.0 | 3.2 | 3.2 |

[0415] All antibodies tested neutralized SARS-CoV-2 and all IgM formatted antibodies were more potent at neutralizing SARS-CoV-2 relative to the IgGs.

### Example 8: In Vivo Assays

[0416] A variety of animal models are contemplated for testing of the disclosed binding molecule, e.g., antibodies to the spike protein of SARS-CoV-2. Such animal models included models described in Munoz-Fontela et al., Nature, 2020, 586: 509-515, which is herein incorporated by reference in its entirety. The most common animal models involve studies in mice, hamsters, and ferrets, as well as non-human primates such as rhesus macaques, cynomolgus macaques, and African green monkeys. Inoculation of virus in all animal models is done via intranasal administration—primate studies may also include intratracheal inoculation. For these studies, authentic SARS-CoV-2 virus, variant strains of SARS-CoV-2, or pseudovirus (e.g., VSV, HIV, Lentivirus, etc.) expressing the SARS-CoV-2 spike protein are used for infection, and dosing of experimental agents is done prophylactically (dosed before infection) or therapeutically (dosed after infection).

[0417] Since mice are not normally susceptible to infection by SARS-CoV-2 due to differences in their ACE2 protein, several methods have been developed to allow reproducible virus replication in this species. These include (i) the use of mice transgenic for human ACE2, (ii) the transduction of human ACE2 into mice via adenovirus or adeno-associated viral vectors, and (iii) the use of mouse-adapted SARS-CoV-2 virus that has been adapted to bind mouse ACE2 via repeated passage in mice. Some examples of mouse-adapted SARS-CoV-2 strains have been described by Li et al., Proc. Natl. Acad. Sci. USA, 2020, 117(47):29832-29838. and Gu et al., Science, 2020, 369 (6511): 1603-1607.

[0418] Similarly, multiple routes of administration for the test antibodies are contemplated for use herein in animal studies of SARS-CoV-2 infection. These include intravenous (IV), intraperitoneal (IP), intranasal (IN), intramuscular (IM), subcutaneous (SC) and inhalation (INH). Antibodies to be tested can be administered before (prophylaxis) or after (treatment) viral infection at doses ranging from for example 0.01 to 50 mg/kg. For mouse studies, typical times for prophylaxis or treatment range from 4 to 48 hrs. before or after infection. Control groups receive isotype control antibodies. Two days after infection, lung samples are harvested from all mice and homogenized in 1 mL PBS and analyzed for infectious virus by plaque assay or by RT-qPCR. In some studies, lung tissues are also collected and examined for changes in morphology, cytokines, and other markers of inflammation. Exemplary protocols are discussed below for studying antibodies to SARS-CoV-2 in vivo.

Studies with Mouse-Adapted SARS-CoV-2

[0419] BALB/c mice (10 to 12 weeks old, 5 to 10 per group) are anesthetized with isoflurane and infected intranasally (IN) with 10⁴ pfu of a mouse-adapted SARS-CoV-2 strain in 50 μL of phosphate-buffered saline (PBS). Antibodies to be tested are administered IP or IN before (prophylaxis) or after (treatment) viral infection, and viral loads in the lung are assessed 48 hrs. post infection.

Studies with Transgenic Mice (e.g., Zhang et al., bioRxiv, 2020, doi: 10.1101/2020.12.08.416677)

[0420] hACE2 transgenic mice (e.g., K18-hACE2, 6- to 9-wk-old, 5 to 6 per group) are treated IP with 0.3 mg (15 mg/kg) of antibody or negative controls 15 h prior to IN infection with 10⁵ pfu of wild-type SARS-CoV-2. Lung tissue is homogenized in phosphate-buffered saline (PBS) and virus replication assessed by plaque assay.

[0421] Alternatively, antibodies of various concentrations are administered IN (20 μL per nostril). Ten hours later, mice are infected IN with SARS-CoV-2 spike protein-expressing pseudotype lentivirus (20 μL per nostril). Seven days after intranasal administration of virus, bioluminescent imaging is performed for each mouse.

Studies with Transduced Mice (e.g., Zost et al., Nature, 2020, 584: 443-449)

[0422] BalbC mice (10-11 weeks old) are given a single intraperitoneal injection of 2 mg of anti-IFNAR1 monoclonal antibody (MAR1-5A355, Leinco) one day before intranasal administration of 2.5×10⁸ PFU of AdV-hACE2. Five days after AdV transduction, mice are inoculated with 4×10⁵ PFU of SARS-CoV-2 via the IN route. Anti-SARS-CoV-2 human monoclonal antibodies or isotype control monoclonal antibodies are administered 24 h before (prophylaxis) or 12 h after (treatment) SARS-CoV-2 inoculation. Weights are monitored on a daily basis, and mice are euthanized at 2 or 7 dpi and tissues are collected for analysis of PFU.

### Studies in Syrian Hamsters (e.g., Tortorici et al., Science, 2020, 370: 950-957)

[0423] Female hamsters of 6-10 weeks old are anesthetized with ketamine/xylazine/atropine and inoculated intranasally with 50 μL containing 2×10⁶ TCID₅₀ SARS-CoV-2. Antibodies to be tested are administered IP up to 48 hours before infection. Hamsters are monitored for appearance, behavior, and weight. At day 4 post infection (pi), hamsters are euthanized by intraperitoneal injection of 500 μL Dolethal (200 mg/mL sodium pentobarbital, Vetoquinol SA). Lungs are collected, and viral RNA and infectious virus were quantified by RT-qPCR and plaque assays, respectively.

### Studies in Rhesus Macaques (e.g., Baum et al., Science, 2020, 370: 1110-1115)

[0424] Antibodies or saline are administered through intravenous infusion. Animals (4 per group) are challenged with 1.1×10⁵ PFU SARS-CoV-2 (USA-WA1/2020 (NR-52281; BEI Resources) total dose divided between IN and intratracheal routes. Virus is administered using a 3 mL syringe to drop-wise instill 1 mL by the intranasal (IN) route (0.5 mL in each nare) and using a French rubber tube, is administered 1 mL via the intratracheal (IT) route. Viral titers are collected by nasal swabs (2× Copan flocked per animal, placed into one vial each with 1 mL PBS) and bronchioalveolar lavage (BAL) using 10 mL saline via a rubber feeding tube. Collected swabs and BAL aliquots are stored at −80° C. until viral load analysis.

### Example 9: Neutralization Assay

[0425] A SARS-CoV-2 live virus microneutralization assay was performed generally as described in Graham et al. (Clin Transl Immunology, 2020, 9(10):e1189, doi: 10.1002/cti2.1189.) as described in Example 7, using various concentrations of IgG1 and IgM versions of Ab10-Ab13. Data were analyzed with using a non-linear regression curve fit (log [inhibitor] vs. normalized response−variable slope) in GraphPad Prism. The resulting % Neutralization of Ab10-Ab13 are shown in FIGS. 5A-5D, respectively. The IC₅₀ and fold improvement over IgG1 for each antibody are shown in Table 5.

TABLE 5
Neutralization Results

| | IgM IC₅₀ | IgG IC₅₀ | IgM Fold Improvement |
|---|---|---|---|
| | (ng/mL) | (ng/mL) | Over IgG1 |
| Ab10 | 1.2 | 470 | 390 |
| Ab11 | 57 | >50,000 | >870 |
| Ab12 | 8.1 | 2700 | 330 |
| Ab13 | 5.8 | >50,000 | >8,600 |

[0426] All antibodies tested neutralized SARS-CoV-2 and all IgM formatted antibodies were more potent at neutralizing SARS-CoV-2 relative to the IgGs.

### Example 10: Pseudovirus Neutralization Assay

[0427] A lentivirus-based SARS-CoV-2 pseudovirus particle was generated expressing spike protein on the surface (Accession number: MN908947.3). The pseudovirus neutralization assay is based on previously described methodologies using luciferase-expressing HIV-1 pseudovirions (Richman et al. (Proc. Natl. Acad. Sci. USA, 2003, 100(7): 4144-4149), Folegatti et al., Lancet, 2020, 396: 467-478). Briefly, neutralizing antibody (Nab) titers were determined by creating 9 serial four-fold dilutions of Ab1-Ab13 IgM or IgG antibodies, which were mixed with ˜10⁵ relative light units (RLU) of SARS-CoV-2 pseudotyped virus and incubated at 37° C. for one hour. Separately, irrelevant pseudotyped control virus was also mixed with test samples. Following the 1-hour incubation, HEK 293 ACE2-transfected cells were added to the well. The plates were incubated for 60-80 hours at 37° C. and then assayed for luciferase expression. Neutralization titers are reported as the reciprocal of the serum dilution conferring 50% inhibition (ID₅₀) of pseudovirus infection. % Inhibition=100%−(((RLU_{(vector+sample+Diluent)}−RLU_{(Background)})/(RLU_{(Vector+Diluent)}−RLU_{(Background)}))×100%). SARS CoV-2 nAb Assay Positive and Negative Control Sera were included on each 96-well assay plate. The data for Ab9 did not meet quality control standards, and therefore are not included in the analysis. Data were analyzed using a non-linear regression curve fit (log [inhibitor] vs. normalized response−variable slope) in GraphPad Prism. The resulting % Neutralization of Ab1-Ab8, and Ab10-Ab13 are shown in FIGS. 6A-6L, respectively. The IC₅₀ and fold improvement over IgG1 for each antibody are shown in Table 6.

TABLE 6
Pseudovirus Neutralization Results

| | IgM IC₅₀ | IgG IC₅₀ | IgM Fold Improvement |
|---|---|---|---|
| | (ng/mL) | (ng/mL) | Over IgG1 |
| Ab1 | 0.15 | 10 | 67 |
| Ab2 | 36 | 530 | 15 |
| Ab3 | 0.11 | 0.57 | 5.2 |
| Ab4 | 0.058 | 1.8 | 31 |
| Ab5 | 0.38 | 1.7 | 4.5 |
| Ab6 | 0.055 | 16 | 290 |
| Ab7 | 0.042 | 0.37 | 8.8 |
| Ab8 | 2.7 | 1.9 | — |
| Ab10 | 0.092 | 5.9 | 64 |
| Ab11 | 3.7 | 320 | 86 |
| Ab12 | 0.42 | 77 | 180 |
| Ab13 | 4.6 | 36 | 7.8 |

### Example 11: Biolayer Interferometry Affinity Measurement Assay

[0428] The binding affinities & avidity of Ab7, Ab8, or Ab10 IgG or IgM antibodies with SARS-CoV-2 RBD (MW 26.5 KDa) or variant RBDs were determined by biolayer interferometry (BLI) on an Octet-384 (Sartorius/ForteBio, NY, USA) using Anti-Penta-His biosensors(Sartorius/Fortebio Cat #18-5120). PBST (1×PBS+1% BSA+0.05% Tween-20) buffer was used as Antibody/RBD/ACE-2 dilution and sensor hydration buffer. The experiment followed a six-step sequential assay at 24° C. First, biosensors were hydrated for 10 minutes. Samples and buffer were applied in 384-well plate. After initial baseline of 30 s, sensors were loaded with various RBDs for 240 s, then moved into buffer for a baseline for 30 s. Next, various concentrations of antibody were associated for 240 s and dissociated for 500 s in PBST. Results were analyzed by ForteBio Data Analysis software 9.0 using global fit model. The K_{D} values are shown in Tables 7-9. Underline indicates significant difference between IgM and IgG formats. WB indicates weak binding.

### Example 12: ACE2 Blocking Assay

[0429] Analysis of the ability of IgG1 and IgM versions of Ab7, Ab8, or Ab10 to block ACE2-Fc (Acrobiosystems, Cat #AC2-H5257) binding of SARS-CoV-2 WT and various variant RBDs was performed by BLI on an Octet-384 (Sartorius/Fortebio, NY, USA) using anti-Penta His biosensors (Sartorius/Fortebio Cat #18-5120). PBST (1×PBS+1% BSA+0.05% Tween-20) buffer was used as Antibody/RBD/ACE-2 dilution and sensor hydration buffer. The experiment followed a six-step sequential assay at 24° C. First, biosensors were hydrated for 10 minutes. Samples and buffer were applied in 384-well plate. After initial baseline of 30 s, sensors were loaded with RBD for 400 s, then moved into buffer for a baseline for 30 s. Next, various concentrations of antibody were associated for 600 s followed by baseline for 20 s. Then, 100 nM of ACE-2 was associated for 600 s. Results were analyzed by ForteBio Data Analysis software 9.0. as (nm) rise of ACE2 binding. % RBD-ACE2 blocking was plotted & IC₅₀ values were calculated using GraphPad Prism 8.0. The IC₅₀ values in nM and M are shown in Tables 7-9. Underline indicates significant difference between IgM and IgG formats. WB indicates weak binding.

TABLE 7
Binding Kinetics and ACE2 Blocking Assay Results for Ab7

| | | RBD | | | | | |
|---|---|---|---|---|---|---|---|
| Ab7 | Ab Format | WT | K417E | G446V | Y453F | E484K | Q493K |
| Avidity | IgM | <0.001 | <0.001 | <0.001 | <0.001 | 0.007 | <0.001 |
| KD (nM) | IgG | <0.001 | <0.001 | <0.001 | <0.001 | WB | <0.001 |
| ACE2 Blocking | IgM | 0.11 | 0.36 | 0.32 | 0.42 | 0.87 | 0.30 |
| IC₅₀ (nM) | IgG | 0.88 | 2.4 | 2.1 | 3.2 | >69 | 2.2 |
| ACE2 Blocking | IgM | 0.098 | 0.31 | 0.28 | 0.36 | 0.76 | 0.26 |
| IC₅₀ (μg/mL) | IgG | 0.13 | 0.35 | 0.30 | 0.46 | >10 | 0.32 |

TABLE 8
Binding Kinetics and ACE2 Blocking Assay Results for Ab8

| | | RBD | | | | | |
|---|---|---|---|---|---|---|---|
| Ab8 | Ab Format | WT | K417E | G446V | Y453F | E484K | Q493K |
| Avidity | IgM | <0.001 | <0.001 | <0.001 | <0.001 | <0.001 | <0.001 |
| KD (nM) | IgG | <0.001 | 2.0 | <0.001 | <0.001 | <0.001 | <0.001 |
| ACE2 Blocking | IgM | 0.30 | 1.2 | 0.90 | 1.1 | 1.5 | 1.3 |
| IC₅₀ (nM) | IgG | 2.8 | 7.2 | 6.1 | 7.2 | 19 | 24 |
| ACE2 Blocking | IgM | 0.26 | 1.0 | 0.78 | 0.98 | 1.3 | 1.1 |
| IC₅₀ (μg/mL) | IgG | 0.41 | 1.0 | 0.88 | 1.0 | 2.8 | 3.5 |

TABLE 9
Binding Kinetics and ACE2 Blocking Assay Results for Ab10

| | | RBD | | | | | |
|---|---|---|---|---|---|---|---|
| Ab10 | Ab Format | WT | K417E | G446V | Y453F | E484K | Q493K |
| Avidity | IgM | <0.001 | <0.001 | 0.11 | <0.001 | <0.001 | <0.001 |
| KD (nM) | IgG | <0.001 | <0.001 | 120 | <0.001 | <0.001 | 0.60 |
| ACE2 Blocking | IgM | 0.27 | 0.32 | 5.0 | 0.49 | 0.47 | 0.35 |
| IC₅₀ (nM) | IgG | 3.2 | 3.8 | >69 | 8.6 | 10 | 4.4 |
| ACE2 Blocking | IgM | 0.23 | 0.28 | 4.3 | 0.42 | 0.41 | 0.30 |
| IC₅₀ (μg/mL) | IgG | 0.46 | 0.55 | >10 | 1.2 | 1.5 | 0.64 |

### Example 13: Biolayer Interferometry Affinity Measurement Assay

[0430] The binding affinities & avidities of Ab3 and Ab4 IgG or IgM antibodies were determined as described in Example 11 with SARS-CoV-2 RBD (MW 26.5 KDa) or a larger number of variant RBDs. The KD values (in nM) are shown in Table 10. Underline indicates significant difference between IgM and IgG formats. NB indicates no binding.

TABLE 10
Binding Kinetics for Ab3 and Ab4

| | | Ab3 | | Ab4 | |
|---|---|---|---|---|---|
| | Ab | Avidity KD (nM) | | Avidity KD (nM) | |
| | Format | IgM | IgG | IgM | IgG |
| RBD | WT | <0.001 | <0.001 | <0.001 | <0.001 |
| | K417E | <0.001 | 1.4 | <0.001 | <0.001 |
| | G446V | <0.001 | <0.001 | <0.001 | <0.001 |
| | Y453F | 0.017 | 64 | <0.001 | <0.001 |
| | E484K | 0.004 | 0.67 | <0.001 | <0.001 |
| | N501Y | <0.001 | <0.001 | <0.001 | <0.001 |
| | S494P | <0.001 | 0.0098 | <0.001 | <0.001 |
| | G446V | <0.001 | <0.001 | 2.3 | NB |
| | F490S | <0.001 | <0.001 | <0.001 | <0.001 |
| | N439K | <0.001 | <0.001 | <0.001 | 0.48 |
| | G476S | <0.001 | <0.001 | 0.0096 | 0.020 |
| | L455F | <0.001 | 1.1 | <0.001 | <0.001 |

### Example 14: Generation of Anti-MERS-CoV Antibodies

[0431] The VH and VL regions of human anti-MERS antibodies, e.g., those listed in Table 13, e.g., the VH and VL of SEQ ID NO: 522 and SEQ ID NO: 523, SEQ ID NO: 576 and SEQ ID NO: 577, SEQ ID NO: 610 and SEQ ID NO: 611, SEQ ID NO: 612 and SEQ ID NO: 613, SEQ ID NO: 614 and SEQ ID NO: 615, or SEQ ID NO: 630 and SEQ ID NO: 631, respectively, are incorporated into IgM, IgA1, and IgA2m2 formats (which may comprise an exemplary J-chain, e.g., a human J-chain, a modified J-chain, or a functional fragment or variant thereof) and IgG format according to standard cloning protocols.

[0432] The IgM, IgA, and IgG antibody constructs are expressed in Expi293 or CHO cells. The IgM antibodies are purified according to methods described in Keyt, B., et al. Antibodies: 9:53, doi: 10.3390/antib9040053 (2020). The IgA and IgG antibodies are purified by affinity chromatography. The IgM antibodies assemble as hexamers or pentamers with a J-chain, and the IgA antibodies assembled as dimers or tetramers with a J-chain.

### Example 15: MERS-CoV Antibody Binding Measured by ELISA

[0433] Binding of anti-MERS-CoV IgM, IgA1, IgA2m2, and IgG antibodies (produced as described in Example 15) to MERS-CoV is measured in ELISA assays as follows: 96-well white polystyrene ELISA plates (Pierce 15042) are coated with 100 μL per well of 0.5 μg/mL recombinant MERS-CoV Receptor Binding Domain (RBD) with a his tag, recombinant MERS-CoV RBD with a Fc tag, or recombinant MERS-CoV spike (S) protein trimer, overnight at 4° C. Plates are then washed 5 times with 0.05% PBS-Tween and blocked with 2% BSA-PBS. After blocking, 100 μL of serial dilutions of anti-MERS-CoV IgM, IgA1, IgA2m2, or IgG antibodies; standards; or controls are added to the wells and are incubated at room temperature for 2 hours. The plates are then washed 10 times and are incubated with HRP conjugated mouse anti-human kappa (Southern Biotech, 9230-05; 1:6000 diluted in 2% BSA-PBS) for 30 min. After 10 final washes using 0.05% PBS-Tween, the plates are read using SuperSignal chemiluminescent substrate (ThermoFisher, 37070). Luminescent data is collected on an EnVision plate reader (Perkin-Elmer) and is analyzed with GraphPad Prism using a 4-parameter logistic model.

### Example 16: MERS-CoV Pseudovirus Neutralization Assay

[0434] A MERS-CoV pseudovirus neutralization assay is performed generally as described in Example 10 using recombinant pseudoviruses expressing the MERS-CoV spike protein, and various concentrations of anti-MERS-CoV antibodies are produced as described in Example 15.

[0435] Briefly, lentivirus-based MERS-CoV pseudovirus particles are generated expressing the MERS-CoV spike protein (e.g., SEQ ID NO: 18) on the surface. The pseudovirus neutralization assay is based on previously described methodologies using luciferase-expressing HIV-1 pseudovirions (Richman et al. (Proc. Natl. Acad. Sci. USA, 2003, 100(7): 4144-4149), Folegatti et al., Lancet, 2020, 396: 467-478). Briefly, neutralizing antibody (Nab) titers are determined by creating 9 serial four-fold dilutions of anti-MERS-CoV IgM, IgG, or IgA antibodies that are produced as described in Example 15, which are mixed with ˜10⁵ relative light units (RLU) of MERS-CoV pseudotyped virus and are incubated at 37° C. for one hour. Separately, irrelevant pseudotyped control virus is also mixed with test samples. Following a 1-hour incubation, human DPP4-expressing cells, e.g., HEK 293 human DPP4-transfected cells are added to the well. The plates are incubated for 60-80 hours at 37° C. and then are assayed for luciferase expression. Neutralization titers are reported as the reciprocal of the serum dilution conferring 50% inhibition (ID₅₀) of pseudovirus infection. % Inhibition=100%−(((RLU_{(Vector+Sample+Diluent)}−RLU_{(Background)})/(RLU_{(Vector+Dluent)}−RLU_{(Background)}))×100%). MERS-CoV nAb Assay Positive and Negative Control Sera are included on each 96-well assay plate. Data are analyzed using a non-linear regression curve fit (log [inhibitor] vs. normalized response−variable slope) in GraphPad Prism.

TABLE 11
Sequences of the Disclosure

| SEQ | | |
|---|---|---|
| ID | Nickname (source) | Sequence |
| 1 | Human IgM Constant | GSASAPTLFPLVSCENSPSDTSSVAVGCLAQDFLPDSITFSWKYKNNSDISSTRGFPSVLRGGKYAATSQVL |
| | region IMGT allele | LPSKDVMQGTDEHVVCKVQHPNGNKEKNVPLPVIAELPPKVSVFVPPRDGFFGNPRKSKLICQATGFSPRQI |
| | IGHM*03 (GenBank: | QVSWLREGKQVGSGVTTDQVQAEAKESGPTTYKVTSTLTIKESDWLSQSMFTCRVDHRGLTFQQNASSMCVP |
| | pir\|S37768\|) | DQDTAIRVFAIPPSFASIFLTKSTKLTCLVTDLTTYDSVTISWTRQNGEAVKTHTNISESHPNATFSAVGEA |
| | | SICEDDWNSGERFTCTVTHTDLPSPLKQTISRPKGVALHRPDVYLLPPAREQLNLRESATITCLVTGFSPAD |
| | | VFVQWMQRGQPLSPEKYVTSAPMPEPQAPGRYFAHSILTVSEEEWNTGETYTCVVAHEALPNRVTERTVDKS |
| | | TGKPTLYNVSLVMSDTAGTCY |
| 2 | Human IgM Constant | GSASAPTLFPLVSCENSPSDTSSVAVGCLAQDFLPDSITFSWKYKNNSDISSTRGFPSVLRGGKYAATSQVL |
| | region IMGT allele | LPSKDVMQGTDEHVVCKVQHPNGNKEKNVPLPVIAELPPKVSVFVPPRDGFFGNPRKSKLICQATGFSPRQI |
| | IGHM*04 (GenBank: | QVSWLREGKQVGSGVTTDQVQAEAKESGPTTYKVTSTLTIKESDWLGQSMFTCRVDHRGLTFQQNASSMCVP |
| | sp\|P01871.4\|) | DQDTAIRVFAIPPSFASIFLTKSTKLTCLVTDLTTYDSVTISWTRQNGEAVKTHTNISESHPNATFSAVGEA |
| | | SICEDDWNSGERFTCTVTHTDLPSPLKQTISRPKGVALHRPDVYLLPPAREQLNLRESATITCLVTGFSPAD |
| | | VFVQWMQRGQPLSPEKYVTSAPMPEPQAPGRYFAHSILTVSEEEWNTGETYTCVVAHEALPNRVTERTVDKS |
| | | TGKPTLYNVSLVMSDTAGTCY |
| 3 | Human IgA1 heavy chain | ASPTSPKVFPLSLCSTQPDGNVVIACLVQGFFPQEPLSVTWSESGQGVTARNFPPSQDASGDLYTTSSQLTL |
| | constant region, e.g., | PATQCLAGKSVTCHVKHYTNPSQDVTVPCPVPSTPPTPSPSTPPTPSPSCCHPRLSLHRPALEDLLLGSEAN |
| | amino acids 144 to 496 | LTCTLTGLRDASGVTFTWTPSSGKSAVQGPPERDLCGCYSVSSVLPGCAEPWNHGKTFTCTAAYPESKTPLT |
| | of GenBank AIC59035.1 | ATLSKSGNTFRPEVHLLPPPSEELALNELVTLTCLARGFSPKDVLVRWLQGSQELPREKYLTWASRQEPSQG |
| | | TTTFAVTSILRVAAEDWKKGDTFSCMVGHEALPLAFTQKTIDRLAGKPTHVNVSVVMAEVDGTCY |
| 4 | Human IgA2 heavy chain | ASPTSPKVFPLSLDSTPQDGNVVVACLVQGFFPQEPLSVTWSESGQNVTARNFPPSQDASGDLYTTSSQLTL |
| | constant region, e.g., | PATQCPDGKSVTCHVKHYTNSSQDVTVPCRVPPPPPCCHPRLSLHRPALEDLLLGSEANLTCTLTGLRDASG |
| | amino acids 1 to 340 | ATFTWTPSSGKSAVQGPPERDLCGCYSVSSVLPGCAQPWNHGETFTCTAAHPELKTPLTANITKSGNTFRPE |
| | of GenBank P01877.4 | VHLLPPPSEELALNELVTLTCLARGFSPKDVLVRWLQGSQELPREKYLTWASRQEPSQGTTTYAVTSILRVA |
| | | AEDWKKGETFSCMVGHEALPLAFTQKTIDRMAGKPTHINVSVVMAEADGTCY |
| 5 | Precursor Human | MLLFVLTCLLAVFPAISTKSPIFGPEEVNSVEGNSVSITCYYPPTSVNRHTRKYWCRQGARGGCITLISSEG |
| | Secretory Component | YVSSKYAGRANLTNFPENGTFVVNIAQLSQDDSGRYKCGLGINSRGLSFDVSLEVSQGPGLLNDTKVYTVDL |
| | | GRTVTINCPFKTENAQKRKSLYKQIGLYPVLVIDSSGYVNPNYTGRIRLDIQGTGQLLFSVVINQLRLSDAG |
| | | QYLCQAGDDSNSNKKNADLQVLKPEPELVYEDLRGSVTFHCALGPEVANVAKFLCRQSSGENCDVVVNTLGK |
| | | RAPAFEGRILLNPQDKDGSFSVVITGLRKEDAGRYLCGAHSDGQLQEGSPIQAWQLFVNEESTIPRSPTVVK |
| | | GVAGGSVAVLCPYNRKESKSIKYWCLWEGAQNGRCPLLVDSEGWVKAQYEGRLSLLEEPGNGTFTVILNQLT |
| | | SRDAGFYWCLTNGDTLWRTTVEIKIIEGEPNLKVPGNVTAVLGETLKVPCHFPCKFSSYEKYWCKWNNTGCQ |
| | | ALPSQDEGPSKAFVNCDENSRLVSLTLNLVTRADEGWYWCGVKQGHFYGETAAVYVAVEERKAAGSRDVSLA |
| | | KADAAPDEKVLDSGFREIENKAIQDPRLFAEEKAVADTRDQADGSRASVDSGSSEEQGGSSRALVSTLVPLG |
| | | LVLAVGAVAVGVARARHRKNVDRVSIRSYRTDISMSDFENSREFGANDNMGASSITQETSLGGKEEFVATTE |
| | | STTETKEPKKAKRSSKEEAEMAYKDFLLQSSTVAAEAQDGPQEA |
| 6 | Precursor Human J | MKNHLLFWGVLAVFIKAVHVKAQEDERIVLVDNKCKCARITSRIIRSSEDPNEDIVERNIRIIVPLNNRENI |
| | Chain | SDPTSPLRTRFVYHLSDLCKKCDPTEVELDNQIVTATQSNICDEDSATETCYTYDRNKCYTAVVPLVYGGET |
| | | KMVETALTPDACYPD |
| 7 | Mature Human J Chain | QEDERIVLVDNKCKCARITSRIIRSSEDPNEDIVERNIRIIVPLNNRENISDPTSPLRTRFVYHLSDLCKKC |
| | | DPTEVELDNQIVTATQSNICDEDSATETCYTYDRNKCYTAVVPLVYGGETKMVETALTPDACYPD |
| 8 | J Chain Y102A mutation | QEDERIVLVDNKCKCARITSRIIRSSEDPNEDIVERNIRIIVPLNNRENISDPTSPLRTRFVYHLSDLCKKC |
| | | DPTEVELDNQIVTATQSNICDEDSATETCATYDRNKCYTAVVPLVYGGETKMVETALTPDACYPD |
| 9 | “5” Peptide linker | GGGGS |
| 10 | “10” Peptide linker | GGGGSGGGGS |
| 11 | “15” Peptide linker | GGGGSGGGGSGGGGS |
| 12 | “20” Peptide linker | GGGGSGGGGSGGGGSGGGGS |
| 13 | “25” Peptide linker | GGGGSGGGGSGGGGSGGGGSGGGGS |
| 14 | human ACE2 UniprotKB | >sp\|Q9BYF1\|ACE2_HUMAN Angiotensin-converting enzyme 2 |
| | Q9BYF1 | OS = Homo sapiens OX = 9606 GN = ACE2 PE = 1 SV = 2 |
| | | MSSSSWLLLSLVAVTAAQSTIEEQAKTFLDKFNHEAEDLFYQSSLASWNYNTNITEENVQ |
| | | NMNNAGDKWSAFLKEQSTLAQMYPLQEIQNLTVKLQLQALQQNGSSVLSEDKSKRLNTIL |
| | | NTMSTIYSTGKVCNPDNPQECLLLEPGLNEIMANSLDYNERLWAWESWRSEVGKQLRPLY |
| | | EEYVVLKNEMARANHYEDYGDYWRGDYEVNGVDGYDYSRGQLIEDVEHTFEEIKPLYEHL |
| | | HAYVRAKLMNAYPSYISPIGCLPAHLLGDMWGRFWINLYSLTVPFGQKPNIDVTDAMVDQ |
| | | AWDAQRIFKEAEKFFVSVGLPNMTQGFWENSMLTDPGNVQKAVCHPTAWDLGKGDFRILM |
| | | CTKVTMDDFLTAHHEMGHIQYDMAYAAQPFLLRNGANEGFHEAVGEIMSLSAATPKHLKS |
| | | IGLLSPDFQEDNETEINFLLKQALTIVGILPFTYMLEKWRWMVFKGEIPKDQWMKKWWEM |
| | | KREIVGVVEPVPHDETYCDPASLFHVSNDYSFIRYYTRTLYQFQFQEALCQAAKHEGPLH |
| | | KCDISNSTEAGQKLFNMLRLGKSEPWILALENVVGAKNMNVRPLLNYFEPLFTWLKDQNK |
| | | NSFVGWSTDWSPYADQSIKVRISLKSALGDKAYEWNDNEMYLFRSSVAYAMRQYFLKVKN |
| | | QMILFGEEDVRVANLKPRISFNFFVTAPKNVSDIIPRTEVEKAIRMSRSRINDAFRLNDN |
| | | SLEFLGIQPTLGPPNQPPVSIWLIVFGVVMGVIVVGIVILIFTGIRDRKKKNKARSGENP |
| | | YASIDISKGENNPGFQNTDDVQTSF |
| 15 | human ACE2 | QSTIEEQAKTFLDKFNHEAEDLFYQSSLASWNYNTNITEENVQNMNNAGDKWSAFLKEQS |
| | Extracellular | TLAQMYPLQEIQNLTVKLQLQALQQNGSSVLSEDKSKRLNTILNTMSTIYSTGKVCNPDN |
| | domain-variant human | PQECLLLEPGLNEIMANSLDYNERLWAWESWRSEVGKQLRPLYEEYVVLKNEMARANHYE |
| | IgG1 hinge region- | DYGDYWRGDYEVNGVDGYDYSRGQLIEDVEHTFEEIKPLYEHLHAYVRAKLMNAYPSYIS |
| | Cmu3, 4tp human P311A, | PIGCLPAHLLGDMWGRFWTNLYSLTVPFGQKPNIDVTDAMVDQAWDAQRIFKEAEKFFVS |
| | P313S | VGLPNMTQGFWENSMLTDPGNVQKAVCHPTAWDLGKGDFRILMCTKVTMDDFLTAHHEMG |
| | | HIQYDMAYAAQPFLLRNGANEGFHEAVGEIMSLSAATPKHLKSIGLLSPDFQEDNETEIN |
| | | FLLKQALTIVGTLPFTYMLEKWRWMVFKGEIPKDQWMKKWWEMKREIVGVVEPVPHDETY |
| | | CDPASLFHVSNDYSFIRYYTRTLYQFQFQEALCQAAKHEGPLHKCDISNSTEAGQKLFNM |
| | | LRLGKSEPWTLALENVVGAKNMNVRPLLNYFEPLFTWLKDQNKNSFVGWSTDWSPYADQS |
| | | IKVRISLKSALGDKAYEWNDNEMYLFRSSVAYAMRQYFLKVKNQMILFGEEDVRVANLKP |
| | | RISFNFFVTAPKNVSDIIPRTEVEKAIRMSRSRINDAFRLNDNSLEFLGIQPILGPPNQP |
| | | PVSVEPKSSDKTHTCPPCPAPDQDTAIRVFAIPPSFASIFLTKSTKLTCLVTDLTTYDSV |
| | | TISWTRQNGEAVKTHTNISESHPNATFSAVGEASICEDDWNSGERFTCTVTHTDLASSLK |
| | | QTISRPKGVALHRPDVYLLPPAREQLNLRESATITCLVTGFSPADVFVQWMQRGQPLSPE |
| | | KYVTSAPMPEPQAPGRYFAHSILTVSEEEWNTGETYTCVVAHEALPNRVTERTVDKSTGK |
| | | PTLYNVSLVMSDTAGTCY |
| 16 | SARS CoV Spike | >sp\|P59594\|SPIKE_SARS Spike glycoprotein OS = Severe acute |
| | Protein | respiratory syndrome coronavirus OX=694009 GN = S PE = 1 SV = 1 |
| | | MFIFLLFLTLTSGSDLDRCTTFDDVQAPNYTQHTSSMRGVYYPDEIFRSDTLYLTQDLFL |
| | | PFYSNVTGFHTINHTFGNPVIPFKDGIYFAATEKSNVVRGWVFGSTMNNKSQSVIIINNS |
| | | TNVVIRACNFELCDNPFFAVSKPMGTQTHTMIFDNAFNCTFEYISDAFSLDVSEKSGNFK |
| | | HLREFVFKNKDGFLYVYKGYQPIDVVRDLPSGFNTLKPIFKLPLGINITNFRAILTAFSP |
| | | AQDIWGTSAAAYFVGYLKPTTFMLKYDENGTITDAVDCSQNPLAELKCSVKSFEIDKGIY |
| | | QTSNFRVVPSGDVVRFPNITNLCPFGEVFNATKFPSVYAWERKKISNCVADYSVLYNSTF |
| | | FSTFKCYGVSATKLNDLCFSNVYADSFVVKGDDVRQIAPGQTGVIADYNYKLPDDFMGCV |
| | | LAWNTRNIDATSTGNYNYKYRYLRHGKLRPFERDISNVPFSPDGKPCTPPALNCYWPLND |
| | | YGFYTTTGIGYQPYRVVVLSFELLNAPATVCGPKLSTDLIKNQCVNFNFNGLTGTGVLTP |
| | | SSKRFQPFQQFGRDVSDFTDSVRDPKTSEILDISPCSFGGVSVITPGTNASSEVAVLYQD |
| | | VNCTDVSTAIHADQLTPAWRIYSTGNNVFQTQAGCLIGAEHVDTSYECDIPIGAGICASY |
| | | HTVSLLRSTSQKSIVAYTMSLGADSSIAYSNNTIAIPTNFSISITTEVMPVSMAKTSVDC |
| | | NMYICGDSTECANLLLQYGSFCTQLNRALSGIAAEQDRNTREVFAQVKQMYKTPTLKYFG |
| | | GFNFSQILPDPLKPTKRSFIEDLLFNKVTLADAGFMKQYGECLGDINARDLICAQKFNGL |
| | | TVLPPLLTDDMIAAYTAALVSGTATAGWTFGAGAALQIPFAMQMAYRFNGIGVTQNVLYE |
| | | NQKQIANQFNKAISQIQESLTTTSTALGKLQDVVNQNAQALNTLVKQLSSNFGAISSVLN |
| | | DILSRLDKVEAEVQIDRLITGRLQSLQTYVTQQLIRAAEIRASANLAATKMSECVLGQSK |
| | | RVDFCGKGYHLMSFPQAAPHGVVFLHVTYVPSQERNFTTAPAICHEGKAYFPREGVFVFN |
| | | GTSWFITQRNFFSPQIITTDNTFVSGNCDVVIGIINNTVYDPLQPELDSFKEELDKYFKN |
| | | HTSPDVDLGDISGINASVVNIQKEIDRLNEVAKNLNESLIDLQELGKYEQYIKWPWYVWL |
| | | GFIAGLIAIVMVTILLCCMTSCCSCLKGACSCGSCCKFDEDDSEPVLKGVKLHYT |
| 17 | SARS-CoV-2 Spike (S) | MFVFLVLLPLVSSQCVNLTTRTQLPPAYTNSFTRGVYYPDKVFRSSVLHSTQDLFLPFFS |
| | Protein, UniProt | NVTWFHAIHVSGTNGTKRFDNPVLPFNDGVYFASTEKSNIIRGWIFGTTLDSKTQSLLIV |
| | P0DTC2 | NNATNVVIKVCEFQFCNDPFLGVYYHKNNKSWMESEFRVYSSANNCTFEYVSQPFLMDLE |
| | | GKQGNFKNLREFVFKNIDGYFKIYSKHTPINLVRDLPQGFSALEPLVDLPIGINITRFQT |
| | | LLALHRSYLTPGDSSSGWTAGAAAYYVGYLQPRTFLLKYNENGTITDAVDCALDPLSETK |
| | | CTLKSFTVEKGIYQTSNFRVQPTESIVRFPNITNLCPFGEVFNATRFASVYAWNRKRISN |
| | | CVADYSVLYNSASFSTFKCYGVSPTKLNDLCFTNVYADSFVIRGDEVRQIAPGQTGKIAD |
| | | YNYKLPDDFTGCVIAWNSNNLDSKVGGNYNYLYRLFRKSNLKPFERDISTEIYQAGSTPC |
| | | NGVEGFNCYFPLQSYGFQPTNGVGYQPYRVVVLSFELLHAPATVCGPKKSTNLVKNKCVN |
| | | FNFNGLTGTGVLTESNKKFLPFQQFGRDIADTTDAVRDPQTLEILDITPCSFGGVSVITP |
| | | GTNTSNQVAVLYQDVNCTEVPVAIHADQLTPTWRVYSIGSNVFQTRAGCLIGAEHVNNSY |
| | | ECDIPIGAGICASYQTQTNSPRRARSVASQSIIAYTMSLGAENSVAYSNNSIAIPTNFTI |
| | | SVTTEILPVSMTKTSVDCTMYICGDSTECSNLLLQYGSFCTQLNRALTGIAVEQDKNTQE |
| | | VFAQVKQIYKTPPIKDFGGFNFSQILPDPSKPSKRSFIEDLLFNKVTLADAGFIKQYGDC |
| | | LGDIAARDLICAQKFNGLTVLPPLLTDEMIAQYTSALLAGTITSGWTFGAGAALQIPFAM |
| | | QMAYRFNGIGVTQNVLYENQKLIANQFNSAIGKIQDSLSSTASALGKLQDVVNQNAQALN |
| | | TLVKQLSSNFGAISSVLNDILSRLDKVEAEVQIDRLITGRLQSLQTYVTQQLIRAAEIRA |
| | | SANLAATKMSECVLGQSKRVDFCGKGYHLMSFPQSAPHGVVFLHVTYVPAQEKNFTTAPA |
| | | ICHDGKAHFPREGVFVSNGTHWFVTQRNFYEPQIITTDNTFVSGNCDVVIGIVNNTVYDP |
| | | LQPELDSFKEELDKYFKNHTSPDVDLGDISGINASVVNIQKEIDRLNEVAKNLNESLIDL |
| | | QELGKYEQYIKWPWYIWLGFIAGLIAIVMVTIMLCCMTSCCSCLKGCCSCGSCCKFDEDD |
| | | SEPVLKGVKLHYT |
| 18 | MERS Spike (S) | >sp\|K9N5Q8\|SPIKE_MERS1 Spike glycoprotein OS = Middle East |
| | Protein, | respiratory syndrome-related coronavirus (isolate United |
| | UniProtKB-K9N5Q8 | Kingdom/H123990006/2012) OX=1263720 GN = S PE = 1 SV = 1 |
| | (SPIKE_MERS1) | MIHSVFLLMFLLTPTESYVDVGPDSVKSACIEVDIQQTFFDKTWPRPIDVSKADGIIYPQ |
| | | GRTYSNITITYQGLFPYQGDHGDMYVYSAGHATGTTPQKLFVANYSQDVKQFANGFVVRI |
| | | GAAANSTGTVIISPSTSATIRKIYPAFMLGSSVGNFSDGKMGRFFNHTLVLLPDGCGTLL |
| | | RAFYCILEPRSGNHCPAGNSYTSFATYHTPATDCSDGNYNRNASLNSFKEYFNLRNCTFM |
| | | YTYNITEDEILEWFGITQTAQGVHLFSSRYVDLYGGNMFQFATLPVYDTIKYYSIIPHSI |
| | | RSIQSDRKAWAAFYVYKLQPLTFLLDFSVDGYIRRAIDCGFNDLSQLHCSYESFDVESGV |
| | | YSVSSFEAKPSGSVVEQAEGVECDFSPLLSGTPPQVYNFKRLVFTNCNYNLTKLLSLFSV |
| | | NDFTCSQISPAAIASNCYSSLILDYFSYPLSMKSDLSVSSAGPISQFNYKQSFSNPTCLI |
| | | LATVPHNLTTITKPLKYSYINKCSRFLSDDRTEVPQLVNANQYSPCVSIVPSTVWEDGDY |
| | | YRKQLSPLEGGGWLVASGSTVAMTEQLQMGFGITVQYGTDTNSVCPKLEFANDTKIASQL |
| | | GNCVEYSLYGVSGRGVFQNCTAVGVRQQRFVYDAYQNLVGYYSDDGNYYCLRACVSVPVS |
| | | VIYDKETKTHATLFGSVACEHISSTMSQYSRSTRSMLKRRDSTYGPLQTPVGCVLGLVNS |
| | | SLFVEDCKLPLGQSLCALPDTPSTLTPRSVRSVPGEMRLASIAFNHPIQVDQLNSSYFKL |
| | | SIPTNFSFGVTQEYIQTTIQKVTVDCKQYVCNGFQKCEQLLREYGQFCSKINQALHGANL |
| | | RQDDSVRNLFASVKSSQSSPIIPGFGGDFNLTLLEPVSISTGSRSARSAIEDLLFDKVTI |
| | | ADPGYMQGYDDCMQQGPASARDLICAQYVAGYKVLPPLMDVNMEAAYTSSLLGSIAGVGW |
| | | TAGLSSFAAIPFAQSIFYRLNGVGITQQVLSENQKLIANKFNQALGAMQTGFTTTNEAFH |
| | | KVQDAVNNNAQALSKLASELSNTFGAISASIGDIIQRLDVLEQDAQIDRLINGRLTTLNA |
| | | FVAQQLVRSESAALSAQLAKDKVNECVKAQSKRSGFCGQGTHIVSFVVNAPNGLYFMHVG |
| | | YYPSNHIEVVSAYGLCDAANPTNCIAPVNGYFIKTNNTRIVDEWSYTGSSFYAPEPITSL |
| | | NTKYVAPQVTYQNISTNLPPPLLGNSTGIDFQDELDEFFKNVSTSIPNFGSLTQINTTLL |
| | | DLTYEMLSLQQVVKALNESYIDLKELGNYTYYNKWPWYIWLGFIAGLVALALCVFFILCC |
| | | TGCGTNCMGKLKCNRCCDRYEEYDLEPHKVHVH |

TABLE 12
Antibody VHH Sequences*

| SEQ | | | | Neutral- |
|---|---|---|---|---|
| ID | VH | Source | Binds to | izes |
| 19 | QVQLVESGGGLVQAGGSLRLSCAASGFPVRKANMHWYRQAPGK | Walter, J., et al., (2020), 18 | SARS-CoV2 | |
| | EREWVAAIMSKGEQTVYADSVEGRFTISRDNAKNTVYLQMNSL | pages, bioRxiv preprint doi: | | |
| | KPEDTAVYYCRVFVGWHYFGQGTQVTVS | 10.1101/2020.04.16.045419 | | |
| 20 | QVQLVESGGGLVQAGGSLRLSCATSGFPVYQANMHWYRQAPGK | Walter, J., et al., (2020), 18 | SARS-CoV2 | |
| | EREWVAAIQSYGDGTHYADSVKGRFTISRDNAKNTVYLQMNSL | pages, bioRxiv preprint doi: | | |
| | KPEDTAVYYCRAVYVGMHYFGQGTQVTVS | 10.1101/2020.04.16.045419 | | |
| 21 | QVQLVESGGGLVQAGGSLRLSCAASGFPVNYKTMWWYRQAPGK | Walter, J., et al., (2020), 18 | SARS-CoV2 | |
| | EREWVAAIWSYGHTTHYADSVKGRFTISRDNAKNTVYLQMNSL | pages, bioRxiv preprint doi: | | |
| | KPEDTAVYYCVVWVGHNYEGQGTQVTVS | 10.1101/2020.04.16.045419 | | |
| 22 | QVQLVESGGGLVQAGGSLRLSCAASGFPVYAQNMHWYRQAPGK | Walter, J., et al., (2020), 18 | SARS-CoV2 | |
| | EREWVAAIYSHGYWTLYADSVKGRFTISRDNAKNTVYLQMNSL | pages, bioRxiv preprint doi: | | |
| | KPEDTAVYYCEVQVGAWYTGQGTQVTVS | 10.1101/2020.04.16.045419 | | |
| 23 | QVQLVESGGGLVQAGGSLRLSCAASGFPVFSGHMHWYRQAPGK | Walter, J., et al., (2020), 18 | SARS-CoV2 | |
| | EREWVAAILSNGDSTHYADSVKGRFTISRDNAKNTVYLQMNSL | pages, bioRxiv preprint doi: | | |
| | KPEDTAVYYCRVHVGAHYFGQGTQVTVS | 10.1101/2020.04.16.045419 | | |
| 24 | QVQLVESGGGLVQAGGSLRLSCAASGFPVEQGRMYWYRQAPGK | Walter, J., et al., (2020), 18 | SARS-CoV2 | |
| | EREWVAAIISHGTVTVYADSVKGRFTISRDNAKNTVYLQMNSL | pages, bioRxiv preprint doi: | | |
| | KPEDTAVYYCYVYVGAQYWGQGTQVTVS | 10.1101/2020.04.16.045419 | | |
| 25 | QVQLVESGGGLVQAGGSLRLSCAASGFPVLFTYMHWYRQAPGK | Walter, J., et al., (2020), 18 | SARS-CoV2 | SARS-CoV2 |
| | EREWVAAIWSSGNSTWYADSVKGRFTISRDNAKNTVYLQMNSL | pages, bioRxiv preprint doi: | | |
| | KPEDTAVYYCFVKVGNWYAGQGTQVTVS | 10.1101/2020.04.16.045419 | | |
| 26 | QVQLVESGGGLVQAGGSLRLSCAASGFPVNAGNMHWYRQAPGK | Walter, J., et al., (2020), 18 | SARS-CoV2 | |
| | EREWVAAIQSYGRTTYYADSVKGRFTISRDNAKNTVYLQMNSL | pages, bioRxiv preprint doi: | | |
| | KPEDTAVYYCRVFVGMHYFGQGTQVTVS | 10.1101/2020.04.16.045419 | | |
| 27 | QVQLVESGGGLVQAGGSLRLSCAASGFPVSSSTMTWYRQAPGK | Walter, J., et al., (2020), 18 | SARS-CoV2 | |
| | EREWVAAINSYGWETHYADSVKGRFTISRDNAKNTVYLQMNSL | pages, bioRxiv preprint doi: | | |
| | KPEDTAVYYCYVYVGGSYIGQGTQVTVS | 10.1101/2020.04.16.045419 | | |
| 28 | QVQLVESGGGLVQAGGSLRLSCAASGFPVQSHYMRWYRQAPGK | Walter, J., et al., (2020), 18 | SARS-CoV2 | |
| | EREWVAAIESTGHHTAYADSVKGRFTISRDNAKNTVYLQMNSL | pages, bioRxiv preprint doi: | | |
| | KPEDTAVYYCTVYVGYEYHGQGTQVTVS | 10.1101/2020.04.16.045419 | | |
| 29 | QVQLVESGGGLVQAGGSLRLSCAASGFPVETENMHWYRQAPGK | Walter, J., et al., (2020), 18 | SARS-CoV2 | |
| | EREWVAAIYSHGMWTAYADSVKGRFTISRDNTKNTVYLQMNSL | pages, bioRxiv preprint doi: | | |
| | KPEDTAVYYCEVEVGKWYFGQGTQVTVS | 10.1101/2020.04.16.045419 | | |
| 30 | QVQLVESGGGLVQAGGSLRLSCAASGFPVKASRMYWYRQAPGK | Walter, J., et al., (2020), 18 | SARS-CoV2 | SARS-CoV2 |
| | EREWVAAIQSFGEVTWYADSVKGRFTISRDNAKNTVYLQMNSL | pages, bioRxiv preprint doi: | | |
| | KPEDTAVYYCYVWVGQEYWGQGTQVTVS | 10.1101/2020.04.16.045419 | | |
| 31 | QVQLVESGGGLVQAGGSLRLSCAASGFPVYASNMHWYRQAPGK | Walter, J., et al., (2020), 18 | SARS-CoV2 | |
| | EREWVAAIESQGYMTAYADSVKGRFTISRDNAKNTVYLQMNSL | pages, bioRxiv preprint doi: | | |
| | KPEDTAVYYCWVIVGEYYVGQGTQVTVS | 10.1101/2020.04.16.045419 | | |
| 32 | QVQLVESGGGLVQAGGSLRLSCAASGFPVQAREMEWYRQAPGK | Walter, J., et al., (2020), 18 | SARS-CoV2 | SARS-CoV2 |
| | EREWVAAIKSTGTYTAYAYSVKGRFTISRDNAKNTVYLQMNSL | pages, bioRxiv preprint doi: | | |
| | KPEDTAVYYCYVYVGSSYIGQGTQVTVS | 10.1101/2020.04.16.045419 | | |
| 33 | QVQLVESGGGLVQAGGSLRLSCAASGFPVKNFEMEWYRKAPGK | Walter, J., et al., (2020), 18 | SARS-CoV2 | SARS-CoV2 |
| | EREWVAAIQSGGVETYYADSVKGRFTISRDNAKNTVYLQMNSL | pages, bioRxiv preprint doi: | | |
| | KPEDTAVYYCEVYVGRSYIGQGTQVTVS | 10.1101/2020.04.16.045419 | | |
| 34 | QVQLVESGGGLVQAGGSLRLSCAASGFPVAYKTMWWYRQAPGK | Walter, J., et al., (2020), 18 | SARS-CoV2 | SARS-CoV2 |
| | EREWVAAIESYGIKWTRYADSVKGRFTISRDNAKNTVYLQMNS | pages, bioRxiv preprint doi: | | |
| | LKPEDTAVYYCIVWVGAQYHGQGTQVTVS | 10.1101/2020.04.16.045419 | | |
| 35 | QVQLVESGGGLVQAGGSLRLSCAASGFPVAGRNMWWYRQAPGK | Walter, J., et al., (2020), 18 | SARS-CoV2 | SARS-CoV2 |
| | EREWVAAIYSSGTYTEYADSVKGRFTISRDNAKNTVYLQMNSL | pages, bioRxiv preprint doi: | | |
| | KPEDTAVYYCHVWVGSLYKGQGTQVTVS | 10.1101/2020.04.16.045419 | | |
| 36 | QVQLVESGGGLVQAGGSLRLSCAASGFPVKHARMWWYRQAPGK | Walter, J., et al., (2020), 18 | SARS-CoV2 | |
| | EREWVAAIDSHGDTTWYADSVKGRFTISRDNAKNTVYLQMNSL | pages, bioRxiv preprint doi: | | |
| | KPEDTAVYYCYVYVGASYWGQGTQVTVS | 10.1101/2020.04.16.045419 | | |
| 37 | QVQLVESGGGLVQAGGSLRLSCAASGFPVNSHEMTWYRQAPGK | Walter, J., et al., (2020), 18 | SARS-CoV2 | |
| | EREWVAAIQSTGTVTEYADSVKGRFTISRDNAKNTVYLQMNSL | pages, bioRxiv preprint doi: | | |
| | KPEDTAVYYCYVYVGSSYLGQGTQVTVS | 10.1101/2020.04.16.045419 | | |
| 38 | QVQLVESGGGLVQAGGSLRLSCAASGFPVEQREMEWYRQAPGK | Walter, J., et al., (2020), 18 | SARS-CoV2 | |
| | EREWVAAIDSNGNYTFYADSVKGRFTISRDNAKNTVYLQMNSL | pages, bioRxiv preprint doi: | | |
| | KPEDTAVYYCYVYVGKSYIGQGTQVTVS | 10.1101/2020.04.16.045419 | | |
| 39 | QVQLVESGGGLVQAGGSLRLSCAASGFPVKHHWMFWYRQAPGK | Walter, J., et al., (2020), 18 | SARS-CoV2 | |
| | EREWVAAIKSYGYGTEYADSVKGRFTISRDNAKNTVYLQMNSL | pages, bioRxiv preprint doi: | | |
| | KPEDTAVYYCFVGVGTHYAGQGTQVTVS | 10.1101/2020.04.16.045419 | | |
| 40 | QVQLVESGGGLVQAGGSLRLSCAASGFPVYAAEMEWYRQAPGK | Walter, J., et al., (2020), 18 | SARS-CoV2 | SARS-CoV2 |
| | EREWVAAISSQGTITYYADSVKGRFTISRDNAKNTVYLQMNSL | pages, bioRxiv preprint doi: | | |
| | KPEDTAVYYCEVYVGKSYIGQGTQVSVS | 10.1101/2020.04.16.045419 | | |
| 41 | QVQLVESGGGLVQAGGSLRLSCAASGFPVYAAEMEWYRQAPGK | Walter, J., et al., (2020), 18 | SARS-CoV2 | SARS-CoV2 |
| | EREWVAAISSQGTITYYADSVKGRFTISRDNAKNTVYLQMNSL | pages, bioRxiv preprint doi: | | |
| | KPEDTAVYYCEVYVGKSYIGQGTQVSVS | 10.1101/2020.04.16.045419 | | |
| 42 | QVQLVESGGGLVQAGGSLRLSCAASGFPVHAWEMAWYRQAPGK | Walter, J., et al., (2020), 18 | SARS-CoV2 | |
| | EREWVAAIRSFGSSTHYADSVKGRFTISRDNAKNTVYLQMNSL | pages, bioRxiv preprint doi: | | |
| | KPEDTAVYYCNVKDFGTHHYAYDYWGQGTQVTVS | 10.1101/2020.04.16.045419 | | |
| 43 | QVQLVESGGGLVQAGGSLRLSCAASGFPVNTWWMHWYRQAPGK | Walter, J., et al., (2020), 18 | SARS-CoV2 | |
| | EREWVAAITSWGFRTYYADSVKGRFTISRDNAKNTVYLQMNSL | pages, bioRxiv preprint doi: | | |
| | KPEDTAVYYCNVKDKGMAVQWYDYWGQGTQVTVS | 10.1101/2020.04.16.045419 | | |
| 44 | QVQLVESGGGLVQAGGSLRLSCAASGFPVYNTWMEWYRQAPGK | Walter, J., et al., (2020), 18 | SARS-CoV2 | |
| | EREWVAAITSHGYKTYYADSVKGRFTISRDNAKNTVYLQMNSL | pages, bioRxiv preprint doi: | | |
| | KPEDTAVYYCNVKDEGDMFTAYDYWGQGTQVTVS | 10.1101/2020.04.16.045419 | | |
| 45 | QVQLVESGGGLVQAGGSLRLSCAASGFPVYHSTMFWYRQAPGK | Walter, J., et al., (2020), 18 | SARS-CoV2 | |
| | EREWVAAIYSSGQHTYYADSVKGRFTISRDNAKNTVYLQMNSL | pages, bioRxiv preprint doi: | | |
| | KPEDTAVYYCNVKDSGQWRQEYDYWGQGTQVTVS | 10.1101/2020.04.16.045419 | | |
| 46 | QVQLVESGGGLVQAGGSLRLSCAASGFPVEHEMAWYRQAPGKE | Walter, J., et al., (2020), 18 | SARS-CoV2 | |
| | REWVAAIRSMGRKTLYADSVKGRFTISRDNAKNTVYLQMNSLK | pages, bioRxiv preprint doi: | | |
| | PEDTAVYYCNVKDFGYTWHEYDYWGQGTQVTVS | 10.1101/2020.04.16.045419 | | |
| 47 | QVQLVESGGGLVQAGGSLRLSCAASGFPVTMAWMWWYRQAPGK | Walter, J., et al., (2020), 18 | SARS-CoV2 | |
| | EREWVAAIRSEGVRTYYADSVKGRFTISRDNAKNTVYLQMNSL | pages, bioRxiv preprint doi: | | |
| | KPEDTAVYYCNVKDYGQAHAYYDYWGQGTQVTVS | 10.1101/2020.04.16.045419 | | |
| 48 | QVQLVESGGGLVQAGGSLRLSCAASGFPVNSHFMEWYRQAPGK | Walter, J., et al., (2020), 18 | SARS-CoV2 | |
| | EREWVAAIQHSSGFHTYYADSVKGRFTISRDNAKNTVYLQMNS | pages, bioRxiv preprint doi: | | |
| | LKPEDTAVYYCNVKDTGTTEDYDYWGQGTQVTVS | 10.1101/2020.04.16.045419 | | |
| 49 | QVQLDESGGGLVQAGGSLRLSCAASGFPVYHAWMEWYRQAPGK | Walter, J., et al., (2020), 18 | SARS-CoV2 | |
| | EREWVAAITSSGRHTYYADSVKGRFTISRDNAKNTVYLQMNSL | pages, bioRxiv preprint doi: | | |
| | KPEDTAVYYCNVKDAGRVYNSYDYWGQGTQVTVS | 10.1101/2020.04.16.045419 | | |
| 50 | QVQLVESGGGLVQAGGSLRLSCAASGFPVAHAWMEWYRQAPGK | Walter, J., et al., (2020), 18 | SARS-CoV2 | |
| | EREWVAAITSYGYKTYYADSVKGRFTISRDNAKNTVYLQMNSL | pages, bioRxiv preprint doi: | | |
| | KPEDTAVYYCNVKDTGTYRFYYDYWGQGTQVTVS | 10.1101/2020.04.16.045419 | | |
| 51 | QVQLVESGGGLVQAGGSLRLSCAASGFPVWNQTMVWYRQAPGK | Walter, J., et al., (2020), 18 | SARS-CoV2 | |
| | EREWVAAIWSMGHTYYADSVKGRFTISRDNAKNTVYLQMNSLK | pages, bioRxiv preprint doi: | | |
| | PEDTAVYYCNVKDAGVYNRYYDYWGQGTQVTVS | 10.1101/2020.04.16.045419 | | |
| 52 | QVQLVESGGGLVQAGGSLRLSCAASGFPVEHYWMEWYRQAPGK | Walter, J., et al., (2020), 18 | SARS-CoV2 | |
| | EREWVAAITSFGYRTYYADSVKGRFTISRDNAKNTVYLQMNSL | pages, bioRxiv preprint doi: | | |
| | KPEDTAVYYCNVKDWGFASHAYDYWGQGIQVTVS | 10.1101/2020.04.16.045419 | | |
| 53 | QVQLVESGGGLVQAGGSLRLSCAASGFPEIAWEMAWYRQAPGK | Walter, J., et al., (2020), 18 | SARS-CoV2 | |
| | EREWVAAIRSFGERTLYADSVKGRFTISRDNAKNTVYLQMNSL | pages, bioRxiv preprint doi: | | |
| | KPEDTAVYYCNVKDFGWQHQEYDYWGQGTQVTVS | 10.1101/2020.04.16.045419 | | |
| 54 | QVQLVESGGGLVQAGGSLRLSCAASGFPVYHAYMEWYRQAPGK | Walter, J., et al., (2020), 18 | SARS-CoV2 | |
| | EREWVAAIYSNGEHTYYADSVKGRFTISRDNAKNTVYLQMNSL | pages, bioRxiv preprint doi: | | |
| | KPEDTAVYYCNVKDSGSFNQAYDYWGQGTQVTVS | 10.1101/2020.04.16.045419 | | |
| 55 | QVQLVESGGGLVQAGGSLRLSCAASGFPVEWSHMHWYRQAPGK | Walter, J., et al., (2020), 18 | SARS-CoV2 | |
| | EREWVAAIVSKGGYTLYADSVKGRFTISRDNAKNTVYLQMNSL | pages, bioRxiv preprint doi: | | |
| | KPEDTAVYYCNVKDYGVHFKRYDYWGQGTQVTVI | 10.1101/2020.04.16.045419 | | |
| 56 | QVQLVESGGGLVQAGGSLRLSCAASGFPVFHVWMEWYRQAPGK | Walter, J., et al., (2020), 18 | SARS-CoV2 | |
| | EREWVAAIDSAGWHTYYADSVKGRFTISRDNAKNTVYLQMNSL | pages, bioRxiv preprint doi: | | |
| | KPEDTAVYYCNVKDAGNTTSAYDYWGQGTQVTVS | 10.1101/2020.04.16.045419 | | |
| 57 | QVQLVESGGGLVQAGGSLRLSCAASGFPVYYNWMEWYRQAPGK | Walter, J., et al., (2020), 18 | SARS-CoV2 | |
| | EREWVAAIHSNGDETFYADSVKGRFTISRDNAKNTVYLQMNSL | pages, bioRxiv preprint doi: | | |
| | KPEDTAVYYCNVKDIDAEAYAYDYWGQGTQVTVS | 10.1101/2020.04.16.045419 | | |
| 58 | QVQLVESGGGLVQAGGSLRLSCAASGFPVYHVWMEWYRQAPGK | Walter, J., et al., (2020), 18 | SARS-CoV2 | |
| | EREWVAAITSSGSHTYYADSVKGRFTISRDNAKNTVYLQMNSL | pages, bioRxiv preprint doi: | | |
| | KPEDTAVYYCNVKDSGQWRVQYDYWGQGTQVTVS | 10.1101/2020.04.16.045419 | | |
| 59 | QVQLVESGGGLVQAGGSLRLSCAASGFPVYWHHMHWYRQAPGK | Walter, J., et al., (2020), 18 | SARS-CoV2 | SARS-CoV2 |
| | EREWVAAIISWGWYTTYADSVKGRFTISRDNAKNTVYLQMNSL | pages, bioRxiv preprint doi: | | |
| | KPEDTAVYYCNVKDHGAQNQMYDYWGQGTQVTVS | 10.1101/2020.04.16.045419 | | |
| 60 | QVQLVESGGGLVQAGGSLRLSCAASGFPVYRDRMAWYRQAPGK | Walter, J., et al., (2020), 18 | SARS-CoV2 | SARS-CoV2 |
| | EREWVAAIYSAGQQTRYADSVKGRFTISRDNAKNTVYLQMNSL | pages, bioRxiv preprint doi: | | |
| | KPEDTAVYYCNVKDVGHHYEYYDYWGQGTQVTVS | 10.1101/2020.04.16.045419 | | |
| 61 | QVQLVESGGGLVQAGGSLRLSCAASGFPVDNGYMHWYRQAPGK | Walter, J., et al., (2020), 18 | SARS-CoV2 | SARS-CoV2 |
| | EREWVAAIDSYGWHTIYADSVKGRFTISRDNAKNTVYLQMNSL | pages, bioRxiv preprint doi: | | |
| | KPEDTAVYYCNVKDKGQMRAAYDYWGQGTQVTVS | 10.1101/2020.04.16.045419 | | |
| 62 | QVQLVESGGGLVQAGGSLRLSCAASGFPVSWHSMYWYRQAPGK | Walter, J., et al., (2020), 18 | SARS-CoV2 | |
| | EREWVAAIFSEGDWTYYADSVKGRFTISRDNAKNTVYLQMNSL | pages, bioRxiv preprint doi: | | |
| | KPEDTAVYYCNVKDYGSSYYKYDYWGQGTQVTVS | 10.1101/2020.04.16.045419 | | |
| 63 | QVQLVESGGGLVQAGGSLRLSCAASGFPVSQSVMAWYRQAPGK | Walter, J., et al., (2020), 18 | SARS-CoV2 | |
| | EREWVAAIYSKGQYTHYADSVKGRFTISRDNAKNTVYLQMNSL | pages, bioRxiv preprint doi: | | |
| | KPEDTAVYYCNVKDAGSSYWDYDYWGQGTQVTVS | 10.1101/2020.04.16.045419 | | |
| 64 | QVQLVESGGGSVQAGGSLRLSCAASGSIGQIEYLGWFRQAPGK | Walter, J., et al., (2020), 18 | SARS-CoV2 | |
| | EREGVAALNTWTGRTYYADSVKGRFTVSLDNAKNTVYLQMNSL | pages, bioRxiv preprint doi: | | |
| | KPEDTALYYCAAARWGRTKPLNTYYYSYWGQGTPVTVS | 10.1101/2020.04.16.045419 | | |
| 65 | QVQLVESGGGSVQAGGSLRLSCAASGYIDKIVYLGWFRQAPGK | Walter, J., et al., (2020), 18 | SARS-CoV2 | |
| | EREGVAALYTLSGHTYYADSVKGRFTVSLDNAKNTVYLQMNSL | pages, bioRxiv preprint doi: | | |
| | KPEDTALYYCAAATEGHAHALYRLHYYWGQGTQVTVS | 10.1101/2020.04.16.045419 | | |
| 66 | QVQLVESGGGLVQAGGSLRLSCAASGFPVYQGEMHWYRQAPGK | Walter, J., et al., (2020), 18 | SARS-CoV2 | |
| | EREWVAAIRSTGVQTWYADSVKGRFTISRDNAKNTVYLQMNSL | pages, bioRxiv preprint doi: | | |
| | KPEDTAVYYCRVWVGTHYFGQGTQVTVS | 10.1101/2020.04.16.045419 | | |
| 67 | QVQLVESGGGSVQAGGSLRLSCAASGNIQRIYYLGWFRQAPGK | Walter, J., et al., (2020), 18 | SARS-CoV2 | |
| | EREGVAALMTYTGHTYYADSVKGRFTVSLDNAKNTVYLQMNSL | pages, bioRxiv preprint doi: | | |
| | KPEDTALYYCAAAYVGAENPLPYSMYGYWGQGTQVTVS | 10.1101/2020.04.16.045419 | | |
| 68 | QVQLVESGGGSVQAGGSLRLSCAASGQISHIKYLGWFRQAPGK | Walter, J., et al., (2020), 18 | SARS-CoV2 | |
| | EREGVAALITRWGQTYYADSVKGRFTVSLDNAKNTVYLQMNSL | pages, bioRxiv preprint doi: | | |
| | KPEDTALYYCAAADYGASDPLWFIHYLYWGQGTQVTVS | 10.1101/2020.04.16.045419 | | |
| 69 | QVQLVESGGGSVQAGGSLRLSCAASGKIWTIKYLGWFRQAPGK | Walter, J., et al., (2020), 18 | SARS-CoV2 | |
| | EREGVAALMTRWGYTYYADSVKGRFTVSLDNAKNTVYLQMNSL | pages, bioRxiv preprint doi: | | |
| | KPEDTALYYCAAANYGSNFPLAEEDYWYWGQGTQVTVS | 10.1101/2020.04.16.045419 | | |
| 70 | QVQLVESGGGSVQAGGSLRLSCAASGNISQIHYLGWFRQAPGK | Walter, J., et al., (2020), 18 | SARS-CoV2 | |
| | EREGVAALNTDYGYTYYADSVKGRFTVSLDNAKNTVYLQMNSL | pages, bioRxiv preprint doi: | | |
| | KPEDTALYYCAAAYYFGDDIPLWWEAYSYWGQGTQVTVS | 10.1101/2020.04.16.045419 | | |
| 71 | QVQLVESGGGSVQAGGSLRLSCAASGNISTIEYLGWFRQAPGK | Walter, J., et al., (2020), 18 | SARS-CoV2 | |
| | EREGVAALYTWHGQTYYADSVKGRFTVSLDNAKNTVYLQMNSL | pages, bioRxiv preprint doi: | | |
| | KPEDTALYYCAAARWGRHMPLSATEYSYWGQGTQVTVS | 10.1101/2020.04.16.045419 | | |
| 72 | QVQLVESGGGSVQAGGSLRLSCAASGNIESIYYLGWFRQAPGK | Walter, J., et al., (2020), 18 | SARS-CoV2 | |
| | EREGVAALWTGDGETYYADSVKGRFTVSLDNAKNTVYLQMNSL | pages, bioRxiv preprint doi: | | |
| | KPEDTALYYCAAAAWGNSAPLTTYRYYYWGQGTQVTVS | 10.1101/2020.04.16.045419 | | |
| 73 | QVQLVESGGGSVQAGGSLRLSCAASGFIYGITYLGWFRQAPGK | Walter, J., et al., (2020), 18 | SARS-CoV2 | |
| | EREGVAALVTWNGQTYYADSVKGRFTVSLDNAKNTVYLQMNSL | pages, bioRxiv preprint doi: | | |
| | KPEDTALYYCAAADWGYDWPLWDEWYWYWGQGTQVTVS | 10.1101/2020.04.16.045419 | | |
| 74 | QVQLVESGGGSVQAGGSLRLSCAASGTIADIKYLGWFRQAPGK | Walter, J., et al., (2020), 18 | SARS-CoV2 | SARS-CoV2 |
| | EREGVAALMTRWGSTYYADSVKGRFTVSLDNAKNTVYLQMNSL | pages, bioRxiv preprint doi: | | |
| | KPEDTALYYCAAANYGANYPLYSQQYSYWGQGTQVTVS | 10.1101/2020.04.16.045419 | | |
| 75 | QVQLVESGGGSVQAGGSLRLSCAASGSISSIKYLGWFRQAPGK | Walter, J., et al., (2020), 18 | SARS-CoV2 | |
| | EREGVAALMTRWGMTYYADSVKGRFTVSLDNAKNTVYLQMNSL | pages, bioRxiv preprint doi: | | |
| | KPEDTALYYCAAANYGANEPLQYTHYNYWGQGTQVTVS | 10.1101/2020.04.16.045419 | | |
| 76 | QVQLVESGGGSVQAGGSLRLSCAASGEIESIFYLGWFRQAPGK | Walter, J., et al., (2020), 18 | SARS-CoV2 | |
| | EREGVAALYTYVGQTYYADSVKGRFTVSLDNAKNTVYLQMNSL | pages, bioRxiv preprint doi: | | |
| | KPEDTALYYCAAASYGAAHPLSIMRYYYWGQGTQVTVS | 10.1101/2020.04.16.045419 | | |
| 77 | QVQLVESGGGSVQAGGSLRLSCAASGTIAHIKYLGWFRQAPGK | Walter, J., et al., (2020), 18 | SARS-CoV2 | |
| | EREGVAALMTKWGQTYYADSVKGRFTVSLDNAKNTVYLQMNSL | pages, bioRxiv preprint doi: | | |
| | KPEDTALYYCAAASYGANFPLKASDYSYWGQGTQVTVS | 10.1101/2020.04.16.045419 | | |
| 78 | QVQLVESGGGSVQAGGSLRLSCAASGSIQAITYLGWFRQAPGK | Walter, J., et al., (2020), 18 | SARS-CoV2 | |
| | EREGVAALVTWNGQTYYADSVKGRFTVSLDNAKNTVYLQMNSL | pages, bioRxiv preprint doi: | | |
| | KPEDTALYYCAAADWGYDWPLWDEWYWYWGQGTQVTVS | 10.1101/2020.04.16.045419 | | |
| 79 | QVQLVESGGGSVQAGGSLRLSCAASGSISSITYLGWFRQAPGK | Walter, J., et al., (2020), 18 | SARS-CoV2 | |
| | EREGVAALVTYSGNTYYADSVKGRFTVSLDNAKNTVYLQMNSL | pages, bioRxiv preprint doi: | | |
| | KPEDTALYYCAAATWGHSWPLYNDEYWYWGQGSQVTVS | 10.1101/2020.04.16.045419 | | |
| 80 | QVQLVESGGGSVQAGGSLRLSCAASGSISSITYLGWFRQAPGK | Walter, J., et al., (2020), 18 | SARS-CoV2 | SARS-CoV2 |
| | EREGVAALITVNGHTYYADSVKGRFTVSLDNAKNTVYLQMNSL | pages, bioRxiv preprint doi: | | |
| | KPEDTALYYCAAAAWGYAWPLHQDDYWYWGQGTQVTVS | 10.1101/2020.04.16.045419 | | |
| 81 | QVQLVESGGGSVQAGGSLRLSCAASGSISSITYLGWFRQAPGK | Walter, J., et al., (2020), 18 | SARS-CoV2 | |
| | EREGVAALNTFNGTTYYADSVKGRFTVSLDNAKNTVYLQMNSL | pages, bioRxiv preprint doi: | | |
| | KPEDTALYYCAAATWGYSWPLIAEYNWYWGQGTQVTVS | 10.1101/2020.04.16.045419 | | |
| 82 | QVQLVESGGGSVQAGGSLRLSCAASGSISSITYLGWFRQAPGK | Walter, J., et al., (2020), 18 | SARS-CoV2 | |
| | EREGVAALKTQAGFTYYADSVKGRFTVSLDNAKNTVYLQMNSL | pages, bioRxiv preprint doi: | | |
| | KPEDTALYYCAAANWGYSWPLYEADDWYWGQGTQVTVS | 10.1101/2020.04.16.045419 | | |
| 83 | QVQLQESGGGLVQAGGSLRLSCAASGRTFSEYAMGWFRQAPGK | Daniel Wrapp et al., 2020 | SARS- | SARS-CoV2 |
| | EREFVATISWSGGSTYYTDSVKGRFTISRDNAKNTVYLQMNSL | (www.sciencedirect.com/ | CoV1, | and SARS- |
| | KPDDTAVYYCAAAGLGTVVSEWDYDYDYWGQGTQVTVSS | science/article/pii/ | SARS-CoV2 | CoV1 |
| | | S0092867420304943) | | |

*Sequence, binding, and neutralization data derived from the CoV-AbDab database: opig.stats.ox.ac.uk/webapps/covabdab/(last visited July 5, 2021) (Raybould, MIJ, et al., Bioinformatics doi = 10.1093/bioinformatics/btaa739 (2020)).

TABLE 13
Antibody VH and VL Sequences*

| SEQ | | SEQ | | | Neutral- | |
|---|---|---|---|---|---|---|
| ID | VH | ID | VL | Binds to | izes | Source |
| 84 | QMQLVQSGTEVKKPGESLKISCKG | 85 | DIQLTQSPDSLAVSLGERATIN | SARS- | SARS- | Meulen, J., et al., |
| | SGYGFITYWIGWVRQMPGKGLEW | | CKSSQSVLYSSINKNYLAWYQ | CoV1, | CoV1 | (2006), PLoS |
| | MGIIYPGDSETRYSPSFQGQVTISA | | QKPGQPPKLLIYWASTRESGV | SARS- | | Medicine, Vol. 3(7): |
| | DKSINTAYLQWSSLKASDTAIYYC | | PDRFSGSGSGTDFTLTISSLQAE | CoV2 | | e237, 1071-1079 |
| | AGGSGISTPMDVWGQGTTVTVSS | | DVAVYYCQQYYSTPYTFGQG | | | |
| | | | TKVEIK | | | |
| 86 | EVQLVQSGAEVKKPGASVKVSCK | 87 | DIVMTQTPATLSLSPGERATLS | SARS- | SARS- | Shi, R., et al., Nature |
| | ASGYTFTSYGISWVRQAPGQGLE | | CRASQSVSSYLAWYQQKPGQ | CoV2 | CoV2 | 584: 120-124 (2020) |
| | WMGWISAYNGNTNYAQKLQGRV | | APRLLIYDASNRATGIPARFSG | | | |
| | TMTTDTSTSTAYMELRSLRSDDTA | | SGSGTDFTLTISSLEPEDFAVY | | | |
| | VYYCAREGYCSGGSCYSGYYYYY | | YCQQRRNWGTFGPGTKVDIK | | | |
| | GMDVWGQGTTVTVSS | | | | | |
| 88 | EVQLVESGGGLVQPGGSLRLSCAA | 89 | DIVMTQSPSSLSASVGDRVTIT | SARS- | SARS- | Shi, R., et al., Nature |
| | SGFTVSSNYMSWVRQAPGKGLEW | | CRASQSISRYLNWYQQKPGKA | CoV2 | CoV2 | 584: 120-124 (2020) |
| | VSVIYSGGSTFYADSVKGRFTISRD | | PKLLIYAASSLQSGVPSRFSGS | | | |
| | NSMNTLFLQMNSLRAEDTAVYYC | | GSGTDFTLTISSLQPEDFATYY | | | |
| | ARVLPMYGDYLDYWGQGTLVTV | | CQQSYSTPPEYTFGQGTKLEIK | | | |
| | SS | | | | | |
| 90 | EVQLVESGGGVVQPGRSLRLSCAA | 91 | DIQLTQSPSSLSASVGDRVTITC | SARS- | SARS- | Robbiani, D., et al., |
| | SGFTFSIYGMHWVRQAPGKGLEW | | RASQSISSYLNWYQQKPGKAP | CoV2 | CoV2 | Nature 584: 437-442 |
| | VAVISYDGSNKYYADSVKGRFTIS | | KLLIYAASSLQSGVPSRFSGSG | | | (2020) |
| | RDNSKNTLYLQMNSLRAEDTAVY | | SGTDFTLTISSLQPEDFATYYC | | | |
| | YCAKEGRPSDIVVVVAFDYWGQG | | QQSYSTPRTFGQGTKVEIK | | | |
| | TLVTVSS | | | | | |
| 92 | EVQLVESGGGLIQPGGSLRLSCAA | 93 | EIVLTQSPGTLSLSPGERATLSC | SARS- | SARS- | Robbiani, D., et al., |
| | SGFTVSSNYMSWVRQAPGKGLEW | | RASQSVSSTYLAWYQQKPGQ | CoV2 | CoV2 | Nature 584: 437-442 |
| | VSVIYSGGSTYYADSVKGRFTISRD | | APRLLIYGASSRATGIPDRFSGS | | (weak) | (2020) |
| | NSKNTLYLQMNSLRAGDTAVYYC | | GSGTDFTLTISRLEPEDFAVYY | | | |
| | ARDYGDFYFDYWGQGTLVTVSS | | CQQYGSSPRTFGQGTKLEIK | | | |
| 94 | QVQLVQSGAEVKKPGASVKVSCK | 95 | AIRMTQSPSSLSASVGDRVTIT | SARS- | SARS- | Robbiani, D., et al., |
| | ASGYTFTGYYMHWVRQAPGQGLE | | CQASQDISNYLNWYQQKPGK | CoV2 | CoV2 | Nature 584: 437-442 |
| | WMGWINPISGGTNYAQKFQGRVT | | APKLLIYDASNLETGVPSRFSG | | | (2020) |
| | MTRDTSISTAYMELSRLRSDDTAV | | SGSGTDFTFTISSLQPEDIATYY | | | |
| | YYCASPASRGYSGYDHGYYYYMD | | CQQYDNLPITFGQGTRLEIK | | | |
| | VWGKGTTVTVSS | | | | | |
| 96 | QVQLVQSGPEVKKPGTSVKVSCK | 97 | EIVLTQSPGTLSLSPGERATLSC | SARS- | SARS- | Robbiani, D., et al., |
| | ASGFTFTSSAVQWVRQARGQRLE | | RASQSVRSSYLAWYQQKPGQ | CoV2 | CoV2 | Nature 584: 437-442 |
| | WIGWIVVGSGNTNYAQKFQERVTI | | APRLLIYGASSRATGIPDRFSGS | | | (2020) |
| | TRDMSTSTAYMELSSLRSEDTAVY | | GSGTDFTLTISRLEPEDFAVYY | | | |
| | YCAAPHCSGGSCLDAFDIWGQGT | | CQQYGSSPWTFGQGTKVEIK | | | |
| | MVTVSS | | | | | |
| 98 | QVQLVESGGGLVKPGGSLRLSCAA | 99 | QSVLTQPPSASGTPGQRVTVSC | SARS- | SARS- | Robbiani, D., et al., |
| | SGFIFSDYCMSWIRRAPGKGLEWL | | SGSSSNIGSNTVNWYQQLPGT | CoV2 | CoV2 | Nature 584: 437-442 |
| | SYISNSGTTRYYADSVKGRFTISRD | | APKLLIYSNNQRPSGVPDRFSG | | (weak) | (2020) |
| | NGRNSLYLQMDSLSAEDTAVYYC | | SKSGTSASLAISGLQSEDEADY | | | |
| | ARRGDGSSSIYYYNYMDVWGKGT | | FCAAWDDSLNGPVFGGGTKL | | | |
| | TVTVSS | | TVL | | | |
| 100 | EVQLVESGGGVVQPGRSLRLSCAA | 101 | DIQMTQSPSTLSASVGDRVTIT | SARS- | SARS- | Robbiani, D., et al., |
| | SGFTFSSYGMHWVRQAPGKGLEW | | CRANQSISSWLAWYQQKPGK | CoV2 | CoV2 | Nature 584: 437-442 |
| | VTVISYDGRNKYYADSVKGRFTIS | | APKLLIYKASSLESGVPSRFSG | | (weak) | (2020) |
| | RDNSKNTLYLQMNSLRAEDTAVY | | SGSGTEFTLTISSLQPDDFATY | | | |
| | YCAREFGDPEWYFDYWGQGTLVT | | YCQQYNSYWTFGQGTKVEIK | | | |
| | VSS | | | | | |
| 102 | QVQLVQSGAEVKKPGASVKVSCM | 103 | QSALTQPPSASGSPGQSVTISC | SARS- | SARS- | Robbiani, D., et al., |
| | ASGYTFTGYYMHWVRQAPGQGLE | | TGTSSDVGGYNYVSWYQQHP | CoV2 | CoV2 | Nature 584: 437-442 |
| | WMGWINPNSGGTNYAQKFQGRV | | GKAPKLMIYEVSKRPSGVPDR | | | (2020) |
| | TMTRDTSISTAYMELSRLRSDDTA | | FSGSKSGNTASLTVSGLQAED | | | |
| | VYYCARDSPFSALGASNDYWGQG | | EAEYYCSSDAGSNNVVFGGGT | | | |
| | TLVTVSS | | KLTVL | | | |
| 104 | EVQLVESGGGVVQPGRSLRLSCAA | 105 | DIQLTQSPSSLSASVGDRVTITC | SARS- | | Robbiani, D., et al., |
| | SGFTFSSYAMHWVRQAPAKGLEW | | RASQSISTYLNWYQQKPGKAP | CoV2 | | Nature 584: 437-442 |
| | VAVILYDGSGKYYADSVKGRFTIS | | KLLIYAASSLQSGVPSRFSGSG | | | (2020) |
| | RDNSKNTLYLQMNSLRAEDTAVY | | SGTDFTLTISSLQPEDFATYYC | | | |
| | YCARDGIVDTALVTWFDYWGQGT | | QQSYSTPPWTFGQGTKVEIK | | | |
| | LVTVSS | | | | | |
| 106 | QVQLVQSGAEVKKPGSSVKVSCK | 107 | EIVLTQSPATLSLSPGERATLSC | SARS- | SARS- | Robbiani, D., et al., |
| | ASGGTFSSYAISWVRQAPGQGLEW | | RASQSVSSYLAWYQQKPGQA | CoV2 | CoV2 | Nature 584: 437-442 |
| | MGGIIPIFGTANYAQKFQGRVTITA | | PRLLIYDASNRATGIPARFSGS | | (weak) | (2020) |
| | DESTSTAYMELSSLRSEDTAVYYC | | GSGTDFTLTISSLEPEDFAVYY | | | |
| | ARGNRLLYCSSTSCYLDAVRQGY | | CQQRSNWPLTFGGGTKVEIK | | | |
| | YYYYYMDVWGKGTTVTVSS | | | | | |
| 108 | EVQLVESGGGVVQPGRSLRLSCAA | 109 | AIRMTQSPSSLSASVGDRVTIT | SARS- | | Robbiani, D., et al., |
| | SGFTFSRYGMHWVRQAPGKGLEW | | CQASQDISNYLNWYQQKPGK | CoV2 | | Nature 584: 437-442 |
| | VAVISYDGSNKYYADSVKGRFTIS | | APKLLIYDASNLETGVPSRFSG | | | (2020) |
| | RDNSKNTLYLQMNSLRAEDTAVY | | SGSGTDFTFTINSLQPEDIATYY | | | |
| | YCAKVTAPYCSGGSCYGGNFDYW | | CQQYDNLPPTFGGGTKVEIK | | | |
| | GQGTLVTVSS | | | | | |
| 110 | EVQLVESGGGLVQPGRSLRLSCAA | 111 | EIVLTQSPATLSLSPGERATLSC | SARS- | SARS- | Robbiani, D., et al., |
| | SGFTFDDYAMHWVRQAPGKGLE | | RASQSVSSYLAWYQQKPGQA | CoV2 | CoV2 | Nature 584: 437-442 |
| | WVSGISWNSGTIGYADSVKGRFTI | | PRLLIYDASNRATGIPARFSGS | | | (2020) |
| | SRDNAKNSLYLQMNSLRAEDTAF | | GSGTDFTLTISSLEPEDFAVYY | | | |
| | YYCAKAGVRGIAAAGPDLNFDHW | | CQQRITFGQGTRLEIK | | | |
| | GQGTLVTVSS | | | | | |
| 112 | EVQLVESGGGVVQPGRSLRLSCAA | 113 | DIQLTQSPSSLSASVGDRVTITC | SARS- | | Robbiani, D., et al., |
| | SGFTFSNYAIHWVRQAPGKGLEW | | RASQSIRSYLNWYQQKPGKAP | CoV2 | | Nature 584: 437-442 |
| | VAVISYDGSNKYYADSVKGRFTIS | | KLLIYAASSLQSGVPSRFSGSG | | | (2020) |
| | RDNSKNTLYLQMNSLRAEDTAVY | | SGTDFTLTISSLQPDDFATYYC | | | |
| | YCARDFDDSSFWAFDYWGQGTLV | | QQSYSTPPATFGQGTKLEIK | | | |
| | TVSS | | | | | |
| 114 | QVQLVQSGAEVKKPGASVKVSCK | 115 | SYELTQPPSVSVAPGKTARITC | SARS- | | Robbiani, D., et al., |
| | ASGYTFTSYYMHWVRQAPGQGLE | | GENNIGSKSVHWYQQKPGQA | CoV2 | | Nature 584: 437-442 |
| | WMGIINPSGGSTSYAQKFQGRVTM | | PVLVIYYDSDRPSGIPERFSGSN | | | (2020) |
| | TRDTSTSTVYMELSSLRSEDTAVY | | SGNTATLTINRVEAGDEADYY | | | |
| | YCARVPREGTPGFDPWGQGTLVT | | CQVWDSSSDHVVFGGGTKLT | | | |
| | VSS | | VL | | | |
| 116 | QVQLQESGPGLVKPSQTLSLTCTV | 117 | DIVMTQSPLSLPVTPGEPASISC | SARS- | | Robbiani, D., et al., |
| | SGGSISSGGYYWSWIRQHPGKGLE | | RSSQSLLHSNGYNYLDWYLQ | CoV2 | | Nature 584: 437-442 |
| | WIGYIYYSGSTYYNPSLKSRVTISV | | KPGQSPQLLIYLGSNRASGVPD | | | (2020) |
| | DTSKNQFSLKLSSVTAADTAVYYC | | RFSGSGSGTDFTLKISRVEAED | | | |
| | ARVWQYYDSSGSFDYWGQGTLVT | | VGVYYCMQALQTPFTFGPGTK | | | |
| | VSS | | VDIK | | | |
| 118 | QVQLQESGPGLVKPSETLSVTCTV | 119 | DIQMTQSPSTLSASVGDSVTIT | SARS- | SARS- | Robbiani, D., et al., |
| | SGGSISSSRYYWGWIRQPPGKGLE | | CRASQSISSWLAWYQQKPGKA | CoV1, | CoV2 | Nature 584: 437-442 |
| | WIGSIYYSGSTYYNPSLKSRVTISV | | PKLLIYKASSLESGVPSRFSGS | SARS- | | (2020) |
| | DTSKNQFSLKLSSVTAADTAVYYC | | GSGTEFTLTISSLQPDDFATYY | CoV2 | | |
| | ARHAAAYYDRSGYYFIEYFQHWG | | CQQYNNYRYTFGQGTKLEIK | | | |
| | QGTLVTVSS | | | | | |
| 120 | EVQLVESGGGVVQPGRSLRLSCAA | 121 | DIQMTQSPSTLSASVGDRVTIT | SARS- | | Robbiani, D., et al., |
| | SGFTFSSYGMHWVRQAPGKGLEW | | CRASQSISSWLAWYQQKPGKA | CoV1 | | Nature 584: 437-442 |
| | VAVISYDGSNKYYADSVKGRFTIS | | PKLLIYKASSLESGVPSRFSGS | (weak), | | (2020) |
| | RDNSKNTLYLQMNSLRAEDTAVY | | GSGTEFTLTISSLQPDDFATYY | SARS- | | |
| | YCAKASGIYCSGGDCYSYYFDYW | | CQQYNSYSTFGQGTKVEIK | CoV2 | | |
| | GQGTLVTVSS | | | | | |
| 122 | QVQLQESGPGLVKPSQTLSLTCTV | 123 | DIVMTQSPLSLPVTPGEPASISC | SARS- | | Robbiani, D., et al., |
| | SGGSISSGGYYWSWIRQHPGKGLE | | RSSQSLLHSNGYNYLDWYLQ | CoV2 | | Nature 584: 437-442 |
| | WIGYIYYSGSTYYNPSLKSRVTISV | | KPGQSPQLLIYLGSNRASGVPD | | | (2020) |
| | DTSKNQFSLKLSSVTAADTAVYYC | | RFSGSGSGTDFTLKISRVEAED | | | |
| | ARTMYYYDSSGSFDYWGQGTLVT | | VGVYYCMQALQTPHTFGGGT | | | |
| | VSS | | KVEIK | | | |
| 124 | EVQLVESGGGVVQPGRSLRLSCAA | 125 | DIQMTQSPSTLSASVGDRVTIT | SARS- | | Robbiani, D., et al., |
| | SGFTFSSYGMHWVRQAPGKGLEW | | CRASQSISSWLAWYQQKPGKA | CoV2 | | Nature 584: 437-442 |
| | VAVISYDGSNKYYADSVKGRFTIS | | PKLLIYKASSLESGVPSRFSGS | | | (2020) |
| | RDNSKNTLYLQMNSLRAEDTAVY | | GSGTEFTLTISSLQPDDFATYY | | | |
| | YCAKASGIYCSGGNCYSYYFDYW | | CQQYNSYSTFGQGTKVEIK | | | |
| | GQGTLVTVSS | | | | | |
| 126 | EVQLVESGGGLVQPGGSLRLSCAA | 127 | DIQMTQSPSSLSASVGDRVTIT | SARS- | | Robbiani, D., et al., |
| | SGFTFSSYDMHWVRQATGKGLEW | | CRASQSISSYLNWYQQKPGKA | CoV2 | | Nature 584: 437-442 |
| | VSAIGTAGDTYYPGSVKGRFTISRE | | PKVLIYAASSLQSGVPSRFSGS | | | (2020) |
| | NAKNSLYLQMNSLRAGDTAVYYC | | GSGTDFTLTISSLQPEDFATYY | | | |
| | ARVGYDSSGYSGWYFDLWGRGTL | | CQQSYSTPPLTFGGGTKVEIK | | | |
| | VTVSS | | | | | |
| 128 | QVQLVESGGGLIQPGGSLRLSCAA | 129 | EIVLTQSPGTLSLSPGERATLSC | SARS- | SARS- | Robbiani, D., et al., |
| | SGFIVSSNYMSWVRQAPGKGLEW | | RASQSVSSSYLAWYQQKPGQ | CoV2 | CoV2 | Nature 584: 437-442 |
| | VSVIYSGGSTFYTDSVKGRFTISRD | | APRLLIYGASSRATGIPDRFSG | | | (2020) |
| | NSKNTLYLQMNSLRAEDTAVYYC | | GGSETDFTLTISRLEPEDCAVY | | | |
| | VRDYGDFYFDYWGQGTLVTVSS | | YCQQYGSSPRTFGQGTKVEIK | | | |
| 130 | QVQLVESGGGLIQPGGSLRLSCAA | 131 | EIVLTQSPGTLSLSPGERATLSC | SARS- | SARS- | Robbiani, D., et al., |
| | SGFIVSSNYMSWVRQAPGKGLEW | | RASQSVSSSYLAWYQQKPGQ | CoV2 | CoV2 | Nature 584: 437-442 |
| | VSVIYSGGSTFYADSVKGRFTISRD | | APRLLIYGASSRATGIPDRFSGS | | | (2020) |
| | NSKNTLYLQMNSLRAEDTAVYYC | | GSGTDFTLTISRLEPEDFAVYY | | | |
| | ARDYGDYYFDYWGQGTLVTVSS | | CQQYGSSPRTFGQGTKVEIK | | | |
| 132 | QVQLQQWGAGLLKPSETLSLTCA | 133 | EIVLTQSPGTLSLSPGERATLSC | SARS- | SARS- | Robbiani, D., et al., |
| | VSGGSLSGFYWTWIRQPPGKGLE | | RASQTVTANYLAWYQQKPGQ | CoV2 | CoV2 | Nature 584: 437-442 |
| | WIGETNHFGSTGYKPSLKSRVTISV | | APRLLIYGASKRATGIPDRFSG | | | (2020) |
| | DMSRNQFSLKVTSVTAADTAVYY | | SGSGTDFTLSISRLEPEDFAVY | | | |
| | CARKPLLYSDFSPGAFDIWGQGTM | | YCQQYTTTPRTFGGGTKVEIK | | | |
| | VTVSS | | | | | |
| 134 | QVQLQQWGAGLLKPSETLSLSCA | 135 | EIVLTQSPGTVSLSPGERATLS | SARS- | SARS- | Robbiani, D., et al., |
| | VYGGSLSGYYWSWIRQPPGKGLE | | CWASQSVSASYLAWYQQKPG | CoV2 | CoV2 | Nature 584: 437-442 |
| | WIGEINHFGSTGYNPSLKSRVTISV | | QAPRLLIYGASSRATGIPDRFS | | | (2020) |
| | DTSKSQFSVKLSSVTAADTAVYYC | | GSGSGTDFTLTISRLEPEDFAV | | | |
| | ARKPLLYSNLSPGAFDIWGQGTMV | | YYCQQYGTTPRTFGGGTKVEI | | | |
| | TVSS | | K | | | |
| 136 | QVQLVESGGGLIQPGGSLRLSCAA | 137 | QSALTQPPSASGSPGQSVTISC | SARS- | SARS- | Robbiani, D., et al., |
| | SGFTVSSNYMSWVRQAPGKGLEW | | TGTSSDVGGYKYVSWYQQHP | CoV2 | CoV2 | Nature 584: 437-442 |
| | VSVIYSGGSTYYADSVKGRFTISRD | | GKAPKLMIYEVSKRPSGVPDR | | | (2020) |
| | NSKNTLYLQMNSLRAEDTAVYYC | | FSGSKSGNTASLTVSGLQAED | | | |
| | ARGEGWELPYDYWGQGTLVTVSS | | EADYYCSSYEGSNNFVVFGGG | | | |
| | | | TKLTVL | | | |
| 138 | QLQLQESGPGLVKPSETLSLTCTVS | 139 | SYELTQPPSVSVAPGKTARITC | SARS- | | Robbiani, D., et al., |
| | GASVSSGSYYWSWIRQPPGKGLE | | GGNNIGSKSVHWYQQKPGQA | CoV1, | | Nature 584: 437-442 |
| | WIGYIYYSGSTNYNPSLKSRVTISV | | PVLVIYFDSDRPSGIPERFSGSN | SARS- | | (2020) |
| | DTSKNQFSLKLSSVTAADTAVYYC | | SGNTATLTISRVEAGDEADYY | CoV2 | | |
| | ARERPGGTYSNTWYTPTDTNWFD | | CQVWDSSRDHVVFGGGTKLT | | | |
| | TWGQGTLVTVSS | | VL | | | |
| 140 | QVQLVQSGAEVKKPGASVRVSCK | 141 | QSVLTQPPSASGTPGQRVTISC | SARS- | | Robbiani, D., et al., |
| | ASGYTFTSYGFSWVRQAPGQGLE | | SGSSSNIGSNYVYWYQQLPGT | CoV2 | | Nature 584: 437-442 |
| | WMGWISAYNGNTNFAQKLQGRV | | APKLLIYRNNQRPSGVPDRFSG | | | (2020) |
| | TMTTDTSTSTAYMELRSLRSDDTA | | SKSGTSASLAISGLRSEDEADY | | | |
| | VYYCARGEAVAGTTGFFDYWGQ | | YCAAWDDSLSGFVVFGGGTK | | | |
| | GTLVTVSS | | LTVL | | | |
| 142 | QVQLQESGPGLVKPSGTLSLTCAV | 143 | QSALTQPASVSGSPGQSITISCT | SARS- | SARS- | Robbiani, D., et al., |
| | SGGSISSTNWWSWVRQPPGKGLE | | GTSSDVGGYNYVSWYQQHPG | CoV2 | CoV2 | Nature 584: 437-442 |
| | WIGEIYHTGSTNYNPSLKSRVTISV | | KAPKLMIYDVSNRPSGVSNRF | | (weak) | (2020) |
| | DKSKNQFSLKLSSVTAADTAVYYC | | SGSKSGNTASLTISGLQAEDEA | | | |
| | VRDGGRPGDAFDIWGQGTMVTVS | | DYYCNSYTSSSTRVFGTGTKV | | | |
| | S | | TVL | | | |
| 144 | EVQLVESGGGLVQPGGSLRLSCAA | 145 | QSALTQPPSASGSPGQSVTISC | SARS- | | Robbiani, D., et al., |
| | SGFTFSSYWMSWVRQAPGKGLEW | | TGTSSDVGGYNYVSWYQQHP | CoV2 | | Nature 584: 437-442 |
| | VANIKQDGSEKYYVDSVKGRFTIS | | GKAPKLMIYEVTKRPSGVPDR | | | (2020) |
| | GDNAKNSLYLHMNSLRAEDTAVY | | FSGSKSGNTASLTVSGLQAED | | | |
| | YCAIQLWLRGGYDYWGQGTLVTV | | EADYYCSSYAGSNNYVVFGG | | | |
| | SS | | GTKLTVL | | | |
| 146 | QVQLQQSGAEVKKPGESLKISCKG | 147 | DIQMTQSPSTLSASVGDRVTIT | SARS- | SARS- | Robbiani, D., et al., |
| | SGYSFTSYWIGWVRQMPGKGLEW | | CRASQSISYWLAWYQQKPGK | CoV2 | CoV2 | Nature 584: 437-442 |
| | MGIIYPGDSDTRYSPSFQGQVTISA | | APKLLIYQASSLESGVPSRFSG | | | (2020) |
| | DKSISTAYMQWSSLKASDTAMYY | | SESGTEFTLTISSLQPDDFATYY | | | |
| | CARSFRDDPRIAVAGPADAFDIWG | | CQQYNSYPYTFGQGTKLEIK | | | |
| | QGTMVTVSS | | | | | |
| 148 | QLQLQESGPGLVKPSETLSLTCTVS | 149 | QSVLTQPPSVSEAPRQRVTISC | SARS- | | Robbiani, D., et al., |
| | GGSISSYYWSWIRQPPGKGLEWIG | | SGSSSNIGNNAVNWYQQVPGK | CoV2 | | Nature 584: 437-442 |
| | YIYYSGSTNYNPSLKSRVTISVDTS | | APKLLIYYDDLLPSGVSDRFSG | | | (2020) |
| | KNQFSLKLSSVTAADTAVYYCAR | | SKSGTSASLAISGLQSEDEADY | | | |
| | VEDWGYCSSTNCYSGAFDIWGQG | | YCAAWDDSLNGAWVFGGGT | | | |
| | TMVTVSS | | KLTVL | | | |
| 150 | QVQLVESGGGVVQPGRSLRLSCA | 151 | QSALTQPASVSGSPGQSITISCT | SARS- | SARS- | Robbiani, D., et al., |
| | ASGFTFSSHAMHWVRQAPGKGLE | | GTSSDVGGYNYVSWYQQHPG | CoV2 | CoV2 | Nature 584: 437-442 |
| | WVAVISYDGSNKYYADSVKGRFTI | | KAPKLMIYDVSNRPSGVSNRF | | (weak) | (2020) |
| | SRDNSKNTLYLQMNSLRAEDTAV | | SGSKSGNTASLTISGLQAEDEA | | | |
| | YYCAREDYYDSSGSFDYWGQGTL | | DYYCSSYTSSSTWVFGGGTKL | | | |
| | VTVSS | | TVL | | | |
| 152 | QVQLVESGGGVVQPGRSLRLSCA | 153 | DIQMTQSPSTLSASVGDRVTIT | SARS- | | Robbiani, D., et al., |
| | ASGFTFSNFGMHWVRQAPGKGLE | | CRASQSMSSWLAWYQQKPGN | CoV2 | | Nature 584: 437-442 |
| | WVAVIWYDGSNKYYADSVKGRFT | | APKLLIYKASSLESGVPSRFSG | | | (2020) |
| | ISRDNSKNTLYLQMNSLRAEDTAV | | SGSGTEFTLTISSLQPDDFATY | | | |
| | YYCARGVNPDDILTGVDAFDIWG | | YCQQHNSSPLTFGGGTKVEIK | | | |
| | QGTMVTVSS | | | | | |
| 154 | QVQLVESGGGLIQPGGSLKLSCVV | 155 | QSVLTQPPSVSGAPGQRVTISC | SARS- | | Robbiani, D., et al., |
| | SGFTVSKNYISWVRQAPGKGLEW | | TGTSSNIGAGYDVHWYQQLPG | CoV2 | | Nature 584: 437-442 |
| | VSVIFAGGSTFYADSVKGRFAISRD | | RAPKVLISGNNIRPSEVPDRFS | | | (2020) |
| | NSNNTLFLQMNSLRVEDTAIYYCA | | GSRSGTSASLAITSLQPEDEAQ | | | |
| | RGDGELFFDQWGQGTLVTVSS | | YYCQSYDSSLYAVFGGGTKLT | | | |
| | | | VL | | | |
| 156 | QVQLVESGGGLIKPGRSLRLSCTAS | 157 | DIVMTQSPLSLSVTPGEPASISC | SARS- | SARS- | Robbiani, D., et al., |
| | GFTFGDYAMTWFRQAPGKGLEW | | RSSQSLLHSNGNNYFDWYLQK | CoV2 | CoV2 | Nature 584: 437-442 |
| | VGFIRSKAYGGTTGYAASVKYRFT | | PGQSPQLLIYLGSNRASGVPDR | | (weak) | (2020) |
| | ISRDDSKSIAYLQMDSLKTEDTAV | | FSGSGSGTDFTLKISRVEAEDV | | | |
| | YYCTRWDGWSQHDYWGQGTLVT | | GVYYCMQVLQIPYTFGQGTKL | | | |
| | VSS | | EIK | | | |
| 158 | QVQLVESGGGVVQPGRSLRLSCA | 159 | NFMLTQPHSVSESPGKTVTISC | SARS- | | Robbiani, D., et al., |
| | ASGFTYSTYAMHWVRQAPGKGLE | | TGSSGSIASNYVQWYQQRPGS | CoV2 | | Nature 584: 437-442 |
| | WVAFISYDGSNKYYADSVKGRFTI | | APTTVIYEDNQRPSGVPDRFSG | | | (2020) |
| | SRDNSKNTLYLQMNSLRAEDTAV | | SIDRSSNSASLTISGLKTEDEAD | | | |
| | YYCARDFYHNWFDPWGQGTLVT | | YYCQSYDSGNHWVVFGGGTR | | | |
| | VSS | | LTVL | | | |
| 160 | QVQLVESGGGVVQPGRSLRLSCA | 161 | QSVLTQPPSVSAAPGQKVTISC | SARS- | SARS- | Robbiani, D., et al., |
| | ASGFTFSTYAMHWVRQAPGEGLE | | SGSSSNIGNNLVSWYQQLPGT | CoV2 | CoV2 | Nature 584: 437-442 |
| | WVAVISYDGSNTYYADSVKGRFTI | | APKLLIYENNKRPSGIPDRFSG | | (weak) | (2020) |
| | SRDNSKNTLYLQMNSLRAEDTAV | | SKSGTSATLGITGLQTGDEAD | | | |
| | YYCARDPIWFGELLSPPFVHFDYW | | YYCGAWDSSLSAGGVYVFGT | | | |
| | GQGTLVTVSS | | GTKVTVL | | | |
| 162 | QVQLVESGGGVVQPGRSLRLSCA | 163 | QPVLTQSPSASASLGASVKLTC | SARS- | SARS- | Robbiani, D., et al., |
| | ASGFTFSNYAMHWVRQAPGKGLE | | TLSSGHSSYAIAWHQQQPEKG | CoV1, | CoV2 | Nature 584: 437-442 |
| | WVAVISYDGSNKYYADSVKGRFTI | | PRYLMKLNTDGSHSKGDGIPD | SARS- | (weak) | (2020) |
| | SRDNSKNTLYLQMNSLRAEDTAIY | | RFSGSSSGAERYLTISSLQSEDE | CoV2 | | |
| | YCASGYTGYDYFVRGDYYGLDV | | ADYYCQTWGTGILVFGGGTK | | | |
| | WGQGTTVTVSS | | LTVL | | | |
| 164 | QVQLVQSGAEVKKPGASVKVSCK | 165 | QSALTQPASVSGSPGQSITISCT | SARS- | SARS- | Robbiani, D., et al., |
| | ASGYTFTSYYMHWVRQAPGQGLE | | GTSSDVGGYKYVSWYQRHPG | CoV2 | CoV2 | Nature 584: 437-442 |
| | WMGIINPSGGSTSYAQKLQGRVT | | KAPKLMIYDVSNRPSGVSNRF | | | (2020) |
| | MTRDTSTSTVYMELSSLRSEDTAV | | SGSKSGNTASLTISGLQAEDEA | | | |
| | YYCARANHETTMDTYYYYYYMD | | DYYCSSYTSSSTSVVFGGGTQ | | | |
| | VWGKGTTVTVSS | | LTVL | | | |
| 166 | EVQLVESGGGLIQPGGSLRLSCAA | 167 | AIRMTQSPSSLSASVGDTVTIT | SARS- | SARS- | Robbiani, D., et al., |
| | SGFTVSSNYMTWVRQAPGKGLEW | | CQASQDISKYLNWYQQKPGK | CoV2 | CoV2 | Nature 584: 437-442 |
| | VSLIYPGGSTYYADSVKGRFTISRD | | APKLLIYDASNLETGVPSRFSG | | | (2020) |
| | NSKNTLYLQMNSLRAEDTAVYYC | | SGSGTDFTFTISSLQPEDIATYY | | | |
| | AREGMGMAAAGTWGQGTLVTVSS | | CQQYDNLPQTFGGGTKVEIK | | | |
| 168 | QVQLVQSGAEVKKPGASVKVSCK | 169 | QSALTQPASVSGSPGQSITISCT | SARS- | SARS- | Robbiani, D., et al., |
| | ASGYTFTGYYMHWVRQAPGQGLE | | GTSSDVGSYNLVSWYQQHPG | CoV2 | CoV2 | Nature 584: 437-442 |
| | WMGWISPVSGGTNYAQKFQGRVT | | KAPKLMIYEGSKRPSGVSNRFS | | | (2020) |
| | MTRDTSISTAYMELSRLRSDDTAV | | GSKSGNTASLTISGLQAEDEAD | | | |
| | YYCARAPLFPTGVLAGDYYYYGM | | YYCCSYAGSSTLVFGGGTKLT | | | |
| | DVWGQGTTVTVSS | | VL | | | |
| 170 | EVQLVESGGGLIQPGGSLRLSCAA | 171 | DIQLTQSPSFLSASVGDRVTITC | SARS- | SARS- | Robbiani, D., et al., |
| | SGLTVSSNYMSWVRQAPGKGLEW | | RASQGISSYLAWYQQKPGKAP | CoV2 | CoV2 | Nature 584: 437-442 |
| | VSVLYSGGSSFYADSVKGRFTISRD | | KLLIYAASTLQSGVPSRFSGSG | | | (2020) |
| | NSKNTLYLQMNSLRAEDTAVYYC | | SGTEFTLTISSLQPEDFATYYC | | | |
| | ARESGDTTMAFDYWGQGTLVTVSS | | QQLNSDSYTFGQGTKLEIK | | | |
| 172 | EVQLVESGGGLIQPGGSLRLSCAA | 173 | DIQLTQSPSFLSASVGDRVTITC | SARS- | SARS- | Robbiani, D., et al., |
| | SGVTVSRNYMSWVRQAPGKGLE | | RASQGISSYLAWYQQKPGKAP | CoV2 | CoV2 | Nature 584: 437-442 |
| | WVSVIYSGGSTYYADSVKGRFTIS | | KLLIYAASTLQSGVPSRFSGSG | | | (2020) |
| | RDNSKNTLYLQMNSLRAEDTAVY | | SGTEFTLTISSLQPEDFATYYC | | | |
| | YCARDLSAAFDIWGQGTMVTVSS | | QQLNSYPPAFGQGTRLEIK | | | |
| 174 | EVQLVESGGGLVQPGGSLRLSCAA | 175 | EIVLTQSPATLSLSPGERATLSC | SARS- | SARS- | Robbiani, D., et al., |
| | SGFTFSGYSMNWVRQAPGKGPEW | | RASQSFSSYLAWYQQKPGQAP | CoV2 | CoV2 | Nature 584: 437-442 |
| | VSYISRSSSTIYYADSVKGRFTISRD | | RLLIYDASNRATGIPARFSGSG | | (weak) | (2020) |
| | NAKNSLYLQMNSLRDEDTAVYYC | | SGTDFTLTISSLEPEDFAVYYC | | | |
| | AREGARVGATYDTYYFDYWGQG | | QQRNNWPPEWTFGQGTKVEI | | | |
| | TLVTVSS | | K | | | |
| 176 | QVQLVQSGPEVKKPGTSVKVSCK | 177 | EIVLTQSPGTLSLSPGERATLSC | SARS- | SARS- | Robbiani, D., et al., |
| | ASGFTFTSSAVQWVRQARGQRLE | | RASQSVSSSYLAWYQQKPGQ | CoV2 | CoV2 | Nature 584: 437-442 |
| | WIGWIVVGSGNTNYAQKFQERVTI | | APRLLIYGASSRATGIPDRFSGS | | | (2020) |
| | TRDMSTSTAYMELSSLRSEDTAVY | | GSGTDFTLTISRLEPEDFAVYY | | | |
| | YCAAPYCSGGSCSDAFDIWGQGT | | CQQYGSSPWTFGQGTKVEIK | | | |
| | MVTVSS | | | | | |
| 178 | QVQLQESGPGLVKPSETLSLSCAV | 179 | NFMLTQPHSVSESPGKTVTISC | SARS- | | Robbiani, D., et al., |
| | SGGSIGSYFWSWIRQPPGKGLEWI | | TGSSGSIASNYVQWYQQRPGS | CoV2 | | Nature 584: 437-442 |
| | GYLHYSGSTNYNPSLKSRVTISVD | | APTTVINEDNQRPSGVPDRFSG | | | (2020) |
| | TSKNQFSLKLSSVTAADTAVYYCA | | SIDSSSNSASLTISGLKTEDEAD | | | |
| | RLQWLRGAFDIWGQGTMVTVSS | | YYCQSYDSSNLVFGGGTKLTV | | | |
| | | | L | | | |
| 180 | QVQLVQSGAEVKKPGASVKVSCK | 181 | QSVLTQPPSASGTPGQRVTISC | SARS- | SARS- | Robbiani, D., et al., |
| | ASGYTFTGYYMHWVRQAPGQGLE | | SGSSSNIGSNTVNWYQQLPGT | CoV2 | CoV2 | Nature 584: 437-442 |
| | WMGWINPNSGGTNYAQKFQGRV | | APKLLIYSNNQRPSGVPDRFSG | | | (2020) |
| | TMTRDTSISTAYMELSRLRSDDTA | | SKSGTSASLAISGLQSEDEADY | | | |
| | VYYCATAHPRRIQGVFFLGPGVW | | YCAAWDDSLNGVVFGGGTKL | | | |
| | GQGTTVTVSS | | TVL | | | |
| 182 | EVQLLESGGGLVQPGGSLRLSCAA | 183 | EIVLTQSPGTLSLSPGERATLSC | SARS- | SARS- | Robbiani, D., et al., |
| | SGFTFSTYAMSWVRQAPGKGLEW | | RASQSVNSRQLAWYQQKPGQ | CoV2 | CoV2 | Nature 584: 437-442 |
| | VSTITGSGRDTYYADSVKGRFTISR | | APRLLIYGASSRATGIPERFSGS | | | (2020) |
| | DNSKNTLFLQLNSLRAEDAAVYSC | | GSGTDFTLTISRLESEDFAVYH | | | |
| | ANHPLASGDDYYHYYMDVWGKG | | CQQYGSSRALTFGGGTKVEIK | | | |
| | TTVTVSS | | | | | |
| 184 | QVQLVQSGAEVKKPGASVKVSCK | 185 | SYELTQPPSVSVAPGKTARITC | SARS- | | Robbiani, D., et al., |
| | ASGYTFTNYYMHWVRQAPGQGLE | | GGNNIGSKSVHWYQQKPGQA | CoV2 | | Nature 584: 437-442 |
| | WMGIINPSGGSTGYAQKFQGRVT | | PVLVIYYDSDRPSGIPERFSGSN | | | (2020) |
| | MTRDTSTSTVYMELSSLRSEDTAV | | SGNTATLTISRVEAGDEADYY | | | |
| | YYCARSRPTPDWYFDLWGRGTLV | | CQVWDSSSDHPGVVFGGGTK | | | |
| | TVSS | | LTVL | | | |
| 186 | QVQLVQSGSEVKKPGSSVKVSCK | 187 | EIVMTQSPATLSVSPGERATLS | SARS- | SARS- | Robbiani, D., et al., |
| | ASGGTFSSYAFSWVRQAPGQGLE | | CRASQSVSSNLAWYQQKPGQ | CoV2 | CoV2 | Nature 584: 437-442 |
| | WMGRIIPILALANYAQKFQGRVTIT | | APRLLIYGASTRATGIPARFSG | | | (2020) |
| | ADKSTSTAYMELSSLRSEDTAVYY | | SGSGTEFTLTISSLQSEDFAVY | | | |
| | CARVNQAVTTPFSMDVWGQGTTV | | YCQQYNNWPITFGQGTRLEIK | | | |
| | TVSS | | | | | |
| 188 | QVQLQESGPGLVKPSGTLSLTCAV | 189 | QSALTQPASVSGSPGQSITISCT | SARS- | SARS- | Robbiani, D., et al., |
| | SGGSISSNNWWSCVRQPPGKGLE | | GTSSDVGGYNYVSWYQQHPG | CoV2 | CoV2 | Nature 584: 437-442 |
| | WIGEIYHSGSTNYNPSLKSRVTISV | | KAPKLMIYDVSNRPSGVSNRF | | (weak) | (2020) |
| | DKSKNQFSLKLSSVTAADTAVYYC | | SGSKSGNTASLTISGLQAEDEA | | | |
| | ARGGDTAMGPEYFDYWGQGTLV | | DYYCSSYTSSSTLLFGGGTKLT | | | |
| | TVSS | | VL | | | |
| 190 | QVQLVESGGGVVQPGRSLRLSCA | 191 | DIQMTQSPSSLSASVGDRVTIT | SARS- | | Robbiani, D., et al., |
| | ASGFTFSSYAMHWVRQAPGKGLE | | CRASQSISSYLNWYQQKPGKA | CoV2 | | Nature 584: 437-442 |
| | WVAVILYDGSNKYYADSVKGRFTI | | PKLLIYAASSLQSGVPSRFSGS | | | (2020) |
| | SRDNSKNTLYLQMNSLRAEDTAV | | GSGTDFTLTISSLQPEDFATYY | | | |
| | YYCARDSDVDTSMVTWFDYWGQ | | CQQSYSTPPWTFGQGTKVEIK | | | |
| | GTLVTVSS | | | | | |
| 192 | EVQLLESGGGLVQPGGSLRLSCAA | 193 | SYELTQPPSVSVAPGKTARITC | SARS- | | Robbiani, D., et al., |
| | SGFTFSNYAMSWVRQAPGKGLEW | | GGNNIGSKSVHWYQQKPGQA | CoV2 | | Nature 584: 437-442 |
| | VSAISGSDGSTYYAGSVKGRFTISR | | PVLVIYYDSDRPSGIPERFSGSN | | | (2020) |
| | DNSKNTLYLQMNSLRAEDTAVYY | | SGNTATLTISRVEAGDEAEYH | | | |
| | CAKDPLITGPTYQYFHYWGQGTL | | CQVWDSSSDRPGVVFGGGTK | | | |
| | VTVSS | | LTVL | | | |
| 194 | QVQLVESGGGVVQPGRSLRLSCA | 195 | DIQMTQSPSTLSASVGDRVTIT | SARS- | SARS- | Robbiani, D., et al., |
| | ASGFTFSSYAMHWVRQAPGKGLE | | CRASQSISNWLAWFQQKPGKA | CoV2 | CoV2 | Nature 584: 437-442 |
| | WVAVIPFDGRNKYYADSVTGRFTI | | PKLLIYEASSLESGVPSRFSGSG | | | (2020) |
| | SRDNSKNTLYLQMNSLRAEDTAV | | SGTEFTLTISSLQPDDFATYYC | | | |
| | YYCASSSGYLFHSDYWGQGTLVT | | QQYNSYPWTFGQGTKVEIK | | | |
| | VSS | | | | | |
| 196 | EVQLVESGGGLVQPGGSLRLSCAA | 197 | NFMLTQPHSVSESPGKTVTISC | SARS- | | Robbiani, D., et al., |
| | SGFTFSTYWMSWVRQPPGKGLEW | | TGSSGSIASNYVQWYQQRPGS | CoV2 | | Nature 584: 437-442 |
| | VANIKQDGSEKYYVDSVKGRFTIS | | APTTVIYEDNQRPSGVPDRFSG | | | (2020) |
| | RDNAKNSLYLQMNSLRADDTAVY | | SIDSSSNSASLTISGLKTEDEAD | | | |
| | YCAGGTWLRSSFDYWGQGTLVTV | | YYCQSYDSSNWVFGGGTKLT | | | |
| | SS | | VL | | | |
| 198 | EVQLVESGGGVVQPGRSLRLSCAA | 199 | DIQMTQSPSSLSASVGDRVTIT | SARS- | | Robbiani, D., et al., |
| | SGFTFSSYAMHWVRQAPGKGLEW | | CQASQDISNYLNWYQQKPGK | CoV2 | | Nature 584: 437-442 |
| | VAVISYDGSNKYSADSVKGRFTIS | | APKLLIYDASNLETGVPSRFSG | | | (2020) |
| | RDNSKNTLYLQMNSLRAEDTAVY | | SGSGTDFTFTISSLQPEDIATYY | | | |
| | YCAKGGAYSYYYYMDVWGKGTT | | CQQYDNLPLTFGGGTKVEIK | | | |
| | VTVSS | | | | | |
| 200 | EVQLVESGGGLVQPGGSLRLSCAA | 201 | DIQLTQSPSFLSASVGDRVTITC | SARS- | SARS- | Robbiani, D., et al., |
| | SGVTVSSNYMSWVRQAPGKGLEW | | RASQGISSYLAWYQQKPGKAP | CoV2 | CoV2 | Nature 584: 437-442 |
| | VSLIYSGGSTFYADSVKGRFTISRD | | KLLIYAASTLQSGVPSRFSGSG | | | (2020) |
| | NSENTLYLQMNTLRAEDTAVYYC | | SGTEFTLTISSLQPEDFATYYC | | | |
| | ARDLYYYGMDVWGQGTTVTVSS | | QQLNSYSYTFGQGTKLEIK | | | |
| 202 | EVQLVESGGGVVQPGRSLRLSCAA | 203 | NFMLTQPHSVSESPGKTVTISC | SARS- | | Robbiani, D., et al., |
| | SGFTFSSYAMFWVRQAPGKGLEW | | TGSSGSIASNYVQWYQQRPGS | CoV2 | | Nature 584: 437-442 |
| | VAVISYDGSNKYYADSVKGRFTIS | | APTTVIYEDNQRPSGVPDRFSG | | | (2020) |
| | RDNSKNTLYLQMNSLRAEDTAVY | | SIDSSSNSASLTISGLKTEDEAD | | | |
| | YCARADLGYCTNGVCYVDYWGQ | | YYCQSYDSSNWVFGGGTKLT | | | |
| | GTLVTVSS | | VL | | | |
| 204 | EVQLVESGGGLVQPGGSLRLSCAA | 205 | QSALTQPASVSGSPGQSITISCT | SARS- | | Robbiani, D., et al., |
| | SGFSVSTKYMTWVRQAPGKGLEW | | GTSNDVGSYTLVSWYQQYPG | CoV2 | | Nature 584: 437-442 |
| | VSVLYSGGSDYYADSVKGRFTISR | | KAPKLLIFEGTKRSSGISNRFSG | | | (2020) |
| | DNSKNALYLQMNSLRVEDTGVYY | | SKSGNTASLTISGLQGEDEADY | | | |
| | CARDSSEVRDHPGHPGRSVGAFDI | | YCCSYAGASTFVFGGGTKLTV | | | |
| | WGQGTMVTVSS | | L | | | |
| 206 | EVQLVESGGGLIQPGGSLRLSCAA | 207 | QSALTQPASVSGSPGQSITISCT | SARS- | SARS- | Robbiani, D., et al., |
| | SGFTVSNNYMSWVRQAPGKGLEW | | GTSSDVGGYNYVSWYQQHPG | CoV2 | CoV2 | Nature 584: 437-442 |
| | VSVIYSGGSTYYADSVKGRFTISRD | | KAPKLMIYDVSNRPSGVSNRF | | | (2020) |
| | KSKNTLYLQMNRLRAEDTAVYYC | | SGSKSGNTASLTISGLQAEDEA | | | |
| | AREGEVEGYNDFWSGYSRDRYYF | | DYYCSSYTSSSTRVFGTGTKV | | | |
| | DYWGQGTLVTVSS | | TVL | | | |
| 208 | EVQLVESGGGLIQPGGSLRLSCAA | 209 | QSALTQPASVSGSPGQSITISCT | SARS- | SARS- | Robbiani, D., et al., |
| | SGFSVSSNYMSWVRQAPGKGLEW | | GTSSDVGGYNYVSWYQQHPG | CoV2 | CoV2 | Nature 584: 437-442 |
| | VSVIYSGGSTYYADSVKGRFTISRD | | KAPKLMIYDVSNRPSGVSNRF | | | (2020) |
| | NSKNTLYLQMNSLRAEDTAVYYC | | SGSKSGNTASLTISGLQAEDEA | | | |
| | AREGEVEGYYDFWSGYSRDRYYF | | DYYCSSYTSSTTRVFGTGTRV | | | |
| | DYWGQGTLVTVSS | | TVL | | | |
| 210 | EVQLVESGGGLVKPGGSLRLSCAA | 211 | QSALTQPASVSGSPGQSITISCT | SARS- | | Robbiani, D., et al., |
| | SGLTFTAYRMNWVRQAPGKGLE | | GTSSDIGVYNYISWSQQHPGK | CoV2 | | Nature 584: 437-442 |
| | WLSSISNTNGDIYYADSVKGRFTIS | | APKVMIYDVTNRPSGVSNRFS | | | (2020) |
| | RDNAKNSLYLQMNSLRADDTAVY | | GSKSGNTASLTISGLQAEDEAD | | | |
| | YCARDVASNYAYFDLWGQGTLVT | | YYCSSYRGSSTPYVFGTGTKV | | | |
| | VSS | | TVL | | | |
| 212 | EVQLVQSGAEVKKPGESLKISCKG | 213 | QAVVTQEPSLTVSPGGTVTLT | SARS- | | Robbiani, D., et al., |
| | SGYRFTNYWIGWVRQMPGKGLE | | CGSSTGAVTSGHYPYWFQQKS | CoV2 | | Nature 584: 437-442 |
| | WMGIIYPGDSDTRYSPSFQGQVTIS | | GQAPRTLIYETSIKHSWTPARF | | | (2020) |
| | ADKSITTAYLQWSSLKASDTAMY | | SGSLLGGKAALTLSGAQPEDE | | | |
| | YCARLSDRWYSPFDPWGQGTLVT | | ADYYCLLSYSGARPVFGGGTK | | | |
| | VSS | | LTVL | | | |
| 214 | EVQLVESGGGLVQPGGSQRLSCAA | 215 | EIVMTQSPATLSVSPGERATLS | SARS- | | Robbiani, D., et al., |
| | SGFTVSSNYMSWIRQAPGKGLEW | | CRASQSVSSHLAWYQQKPGQ | CoV2 | | Nature 584: 437-442 |
| | VSVIYSGGSAYYVDSVKGRFTISR | | APRLLIYGASTRATGIPTRFSGS | | | (2020) |
| | DNSKNTLYLQMNSLRPEDTAVYY | | GSGTEFTLTISSLQSEDFAVYY | | | |
| | CARIANYMDVWGKGTTVTVSS | | CQQYNNWPPLTFGGGTKVEIK | | | |
| 216 | EVQLVESGGGLVQPGGSLRLSCVA | 217 | QSALTQPASVSGSPGQSITISCT | SARS- | | Robbiani, D., et al., |
| | SGFTFSSYWMHWVRQVPGKGPV | | GTSSDVGYYNFVSWYQQHPG | CoV2 | | Nature 584: 437-442 |
| | WVSHINSEGSSTNYADSVRGRFTIS | | KAPKLMIYEVSNRPSGVSNRFS | | | (2020) |
| | RDNAKDTLYLQMNNLRAEDTAVY | | GSKSGNTASLIISGLQAEDEAD | | | |
| | YCARPTAVAAAGNYFYYYGMDV | | YYCSSYRSSSTLVFGGGTKLT | | | |
| | WGQGTTVTVSS | | VL | | | |
| 218 | EVQLVESGGGLVKPGGSLRLSCAA | 219 | NFMLTQPHSVSESPGKTVTISC | SARS- | SARS- | Robbiani, D., et al., |
| | SGFTFSSYNMNWVRQAPGKGLEW | | TGSSGSIASNYVQWYQQRPGS | CoV2 | CoV2 | Nature 584: 437-442 |
| | VSCISSSSSYIYYADSVKGRFTISRD | | APTTVIYEDNQRPSGVPDRFSG | | (weak) | (2020) |
| | NAKNSLYLQMNSLRAEDTAVYYC | | SIDSSSNSASLTISGLKTEDEAD | | | |
| | ARERGYDGGKTPPFLGGQGTLVT | | YYCQSYDSSNYWVFGGGTKL | | | |
| | VSS | | TVL | | | |
| 220 | EVQLVESGGGLIQPGGSLRLSCAA | 221 | QSALTQPASVSGSPGQSITISCT | SARS- | SARS- | Nature 584: 437-442 |
| | SGFTVSSNYMSWVRQAPGKGLEW | | GTSSDVGSYNLVSWYQQHPG | CoV2 | CoV2 | (2020) |
| | VSVIYSGYSTYYVDSVKGRFTISRD | | KAPKLMIYEGSKRPSGVSNRFS | | (weak) | |
| | NSKNTLYLQMNSLRAEDTAVYYC | | GSKSGNTASLTISGLQAEDEAD | | | |
| | ARVGGAHSGYDGSFDYWGQGTL | | YYCCSYAGSSTWVFGGGTKLT | | | |
| | VTVSS | | VL | | | |
| 222 | QVQLVESGGGVVQPGRSLRLSCA | 223 | DIQMTQSPSSLSASVGDRVTIT | SARS- | SARS- | Robbiani, D., et al., |
| | ASGFTFSRYGMHWVRQAPGKGLE | | CQASQGISNYLNWYQQKPGK | CoV1, | CoV2 | Nature 584: 437-442 |
| | WVAVMSYDGSSKYYADSVKGRFT | | APKLLIYDASNLETGVPSRFSG | SARS- | (weak) | (2020) |
| | ISRDNSKNTLCLQMNSLRAEDTAV | | SGSGTDFTFTISSLQPEDIATYY | CoV2 | | |
| | YYCAKQAGPYCSGGSCYSAPFDY | | CQQYDNLPITFGQGTRLEIK | | | |
| | WGQGTLVTVSS | | | | | |
| 224 | EVQLVESGGGLIQPGGSLRLSCAA | 225 | EIVMTQSPATLSVSPGERATLS | SARS- | SARS- | Robbiani, D., et al., |
| | SGFIVSSNYMSWVRQAPGKGLEW | | CRASQSVSSNLAWYQQKPGQ | CoV2 | CoV2 | Nature 584: 437-442 |
| | VSVIYSGGSTFYADSVKGRFTISRD | | APRLLIYGASTRATAIPARFSG | | | (2020) |
| | NSKNTLYLQMNSLRAEDTAVYYC | | SGSGTEFTLTISSLQSEDFAVY | | | |
| | ARDFGEFYFDYWGQGTLVTVSS | | YCQQYNNWPRTFGQGTKVEI | | | |
| | | | K | | | |
| 226 | QVQLVESGGGVVQPGRSLRLSCA | 227 | SYELTQPPSVSVAPGQTARISC | SARS- | | Robbiani, D., et al., |
| | ASGFTFSNYGMHWVRQAPGKGLE | | GGNNIGSKNVHWYQQKPGQA | CoV2 | | Nature 584: 437-442 |
| | WVAVISYDGNNKYYADSVKGRFT | | PVLVVYDDSDRPSGIPERFSGS | | | (2020) |
| | ISRDNSKNTLYLQMNSLRAEDTAV | | NSGNTATLTISRVEAGDEADY | | | |
| | YYCAKDPFPLAVAGTGYFDYWGQ | | YCQVWDSSSDPWVFGGGTKL | | | |
| | GTLVTVSS | | TVL | | | |
| 228 | EVQLVESGGGLVQPGGSLRLSCAA | 229 | QSALTQPASVSGSPGQSITISCT | SARS- | SARS- | Robbiani, D., et al., |
| | SGFSVSTKYMTWVRQAPGKGLEW | | GTSNDVGSYTLVSWYQQYPG | CoV2 | CoV2 | Nature 584: 437-442 |
| | VSVLYSGGSDYYADSVKGRFTISR | | KAPKLLIFEVTKRSSGISNRFSG | | (weak) | (2020) |
| | DNSKNALYLQMNSLRVEDTGVYY | | SKSGNTASLTISGLQGEDEADY | | | |
| | CARDSSEVRDHPGHPGRSVGAFDI | | YCCSYAGASTFVFGGGTKLTV | | | |
| | WGQGTMVTVSS | | L | | | |
| 230 | QVQLVQSGAEVKKPGSSVKVSCK | 231 | EIVLTQSPGTLSLSPGERATLSC | SARS- | SARS- | Robbiani, D., et al., |
| | ASGGTFSSYAINWVRQAPGQGLE | | RASQSVSSTYLAWYQQKPGQ | CoV2 | CoV2 | Nature 584: 437-442 |
| | WMGRIIPIVGIANYAQKFQGRVTIT | | APRLLIYGASSRATGIPDRFSGS | | | (2020) |
| | ADKSSSTAYMELSSLRSEDTAVYY | | GSGTDFTLTISRLEPEDFAVYY | | | |
| | CARDLLDPQLDDAFDIWGQGTMV | | CQQYGSSPWTFGQGTKVEIK | | | |
| | TVSS | | | | | |
| 232 | EVQLVESGGGLVQPGRSLRLSCAA | 233 | IRMTQSPSSVSASVGDRVTITC | SARS- | | Robbiani, D., et al., |
| | SGFTFDDYAMHWVRQAPGKGLE | | RASQGISSWLAWYQQKPGKA | CoV2 | | Nature 584: 437-442 |
| | WVSGISWNSGSIGYADSVKGRFTIS | | PKLLIYVESSLQSGVPSRFSGS | | | (2020) |
| | RDNAKNSLYLQMNSLRAEDTALY | | GSGTDFTLTISSLQPEDFATYY | | | |
| | YCVKGVEYSSSSNFDYWGQGTLV | | CQQANSFPLTFGGGTKVEIK | | | |
| | TVSS | | | | | |
| 234 | EVQLVESGGGLVQPGGSLRLSCAA | 235 | DIQLTQSPSSLSASVGDRVTITC | SARS- | | Robbiani, D., et al., |
| | SGFTVSSNYMSWVRQAPGKGLEW | | QASQDISNYLNWYQQKPGKA | CoV2 | | Nature 584: 437-442 |
| | VSLIYSGGSTYYADSVKGRFTISRD | | PKLLIYDASNLETGVPSRFSGS | | | (2020) |
| | NSKNTLYLQMNSLRAEDTAVYYC | | GSGTDFTFTISSLQPEDIATYYC | | | |
| | ARDTLGRGGDYWGQGTLVTVSS | | QQYDNLPRSFGQGTKLEIK | | | |
| 236 | EVQLLESGGGLEQPGGSLRLSCAA | 237 | DIQLTQSPSSLSASVGDRVTITC | SARS- | | Robbiani, D., et al., |
| | SGFTFSTYAMSWVRQAPGKGLEW | | RASQSISSYLNWYQQKPGKAP | CoV1, | | Nature 584: 437-442 |
| | VSAISGSGAGTFYADSVKGRFTISR | | KLLIYAASSLQSGVPSRFSGSG | SARS- | | (2020) |
| | DNSKNTLYLQMNSLRAEDTAVYY | | SGTDFTLTISSLQPEDFATYYC | CoV2 | | |
| | CARESDCGSTSCYQVGWFDPWGQ | | QQSYSTPPWTFGQGTKVEIK | | | |
| | GTLVTVSS | | | | | |
| 238 | QVQLVQSGAEVKKPGASVKVSCK | 239 | EIVLTQSPGTLSLSPGERATLSC | SARS- | | Robbiani, D., et al., |
| | ASGHTFTSYYMHWVRQAPGQGLE | | RASQSVSSSYLAWYQQKPGQ | CoV2 | | Nature 584: 437-442 |
| | WMGIINPSGGSTSYAQKFQGRVTM | | APRLLIYGASSRATGIPDRFSGS | | | (2020) |
| | TRDTSTSTVYMELSSLRSEDTAVY | | GSGTDFTLTISRLEPEDFAVYY | | | |
| | YCARGPERGIVGATDYFDYWGQG | | CQQYVSSPWTFGQGTKVEIK | | | |
| | TLVTVSS | | | | | |
| 240 | EVQLLESGGGLVQPGGSLRLSCAA | 241 | EIVLTQSPATLSLSPGERATLSC | SARS- | SARS- | Robbiani, D., et al., |
| | SGFTFSSYAMSWVRQAPGKGLEW | | RASQSVSSYLAWYQQKPGQA | CoV2 | CoV2 | Nature 584: 437-442 |
| | VSAISGSGGSTYYADSVKGRFTISR | | PRLLIYDASNRATGIPARFSGS | | (weak) | (2020) |
| | DNSKNTLYLQMNSLRAEDTAVYY | | GSGTDFTLTISSLEPEDFAVYY | | | |
| | CAKEPIGQPLLWWDYWGQGTLVT | | CQQRSNWPRGFGQGTKVEIK | | | |
| | VSS | | | | | |
| 242 | EVQLVQSGAEVKKPGESLKISCKG | 243 | EIVLTQSPGTLSLSPGERATLSC | SARS- | | Robbiani, D., et al., |
| | SGYSFTSYWIGWVRQMPGKGLEW | | RASQSVSGSYLAWYQQRPGQ | CoV2 | | Nature 584: 437-442 |
| | MGIIYPGDSDTRYSPSFQGQVTISA | | APRLLIYGASSRATGIPDRFSGS | | | (2020) |
| | DKSISTAYLKWSSLKASDSAMYYC | | GSGTDFTLTISRLEPEDFAVYY | | | |
| | ARGPNLQNWFDPWGQGTLVTVSS | | CQQYGSSLTFGGGTKVEIK | | | |
| 244 | EVQLVESGGGLIQPGGSLRLSCAA | 245 | DIQLTQSPSFLSASVGDRVTITC | SARS- | SARS- | Robbiani, D., et al., |
| | SGFTVSSNYMSWVRQAPGKGLEW | | RASQGISSYLAWYQQKPGKAP | CoV2 | CoV2 | Nature 584: 437-442 |
| | VSVIYSGGSTFYADSVKGRFTFSRD | | KLLIYAASTLQSGVPSRFSGSG | | | (2020) |
| | NSKNTLYLQMNSLRAEDTAVYYC | | SGTEFTLTISSLQPEDFATYYC | | | |
| | ARDLMAYGMDVWGQGTTVTVSS | | QQLNSYPQGTFGGGTKVEIK | | | |
| 246 | EVQLVESGGGLVQPGGSLRLSCAA | 247 | EIVMTQSPATLSVSPGERATLS | SARS- | SARS- | Robbiani, D., et al., |
| | SEFTVSSNYMSWVRQAPGKGLEW | | CRASQSVSSNLAWYQQKPGQ | CoV2 | CoV2 | Nature 584: 437-442 |
| | VSVIYSGGSTFYADSVKGRFTISRD | | GPRLLIYGASTRATGIPARFSG | | | (2020) |
| | NSKNTLYLQMNSLRPEDTAVYYC | | SGSGTEFTLTISSLQSEDFAVY | | | |
| | ARDYGDFYFDFWGQGTLVTVSS | | YCQQYNNWPRTFGQGTKVEIK | | | |
| 248 | QVQLVQSGAEVKKPGASVKVSCK | 249 | LTQPASVSGSPGQSITISCTGTS | SARS- | | Robbiani, D., et al., |
| | ASGYTVTGYYIHWVRQAPGQGLE | | SDVGSYNLVSWYQQHPGKAP | CoV2 | | Nature 584: 437-442 |
| | WMGWISPNSGGTNYAQKFQGWV | | KLMIYEDSKRPSGVSNRFSGSK | | | (2020) |
| | TMTRDMSITTAYMELSRLRSDDTA | | SGNTASLTISGLQAEDEADYY | | | |
| | VYYCARERYFDLGGMDVWGQGT | | CCSYAGSSTRLFGGGTKLTVL | | | |
| | TVTVSS | | | | | |
| 250 | QVQLVESGGGVVQPGRSLRLSCA | 251 | DIQLTQSPSSLSASVGDRVTITC | SARS- | | Robbiani, D., et al., |
| | ASGFTFSSYGMHWVRQAPGKGLE | | RASQSISSYLTWYQQKPGKAP | CoV2 | | Nature 584: 437-442 |
| | WVAAIWYDGSNKHYADSVKGRFT | | KLLIYAASSLQSGVPSRFSGSG | | | (2020) |
| | ISRDNSKNTLYLQMNSLRAEDTAV | | SGTDFTLTISSLQPEDFATYYC | | | |
| | YYCARDVGRVTTWFDPWGQGTL | | QQSYSTPPWTFGQGTKVEIK | | | |
| | VTVSS | | | | | |
| 252 | EVQLLESGGGLVQPGGSLRLSCAA | 253 | DIQLTQSPSSLSASVGDRVTITC | SARS- | | Robbiani, D., et al., |
| | SGFTFSSYAMSWVRQAPGKGLEW | | RASQSISSYLNWYQQKPGKAP | CoV1, | | Nature 584: 437-442 |
| | VSAITDSGDGTFYADSVKGRFTISR | | KLLIYAASSLQSGVPSRFSGSG | SARS- | | (2020) |
| | DNSKNTLYLQMNSLRAEDTAVYY | | SGTDFTLTISSLQPEDFATYYC | CoV2 | | |
| | CASEEDYSNYVGWFDPWGQGTLV | | QQSYSTPPWTFGQGTKVEIK | | | |
| | TVSS | | | | | |
| 254 | EVQLVESGGGLVQPGGSLRLSCAA | 255 | DIQLTQSPSSLSASVGDRVTITC | SARS- | | Robbiani, D., et al., |
| | SGFTFSSYDMHWVRQATGKGLEW | | RASQSISSYLNWYQQKPGKAP | CoV2 | | Nature 584: 437-442 |
| | VSAIGTAGDTYYPDSVKGRFTISRE | | KLLIYVASSLQSGVPSRFSGSG | | | (2020) |
| | NAKNSLYLQMNSLRAGDTAVYYC | | SGTDFTLTISSLQPEDFATYYC | | | |
| | ARDRGSSGWYGWYFDLWGRGTL | | QQSYSTPPITFGQGTRLEIK | | | |
| | VTVSS | | | | | |
| 256 | EVQLVESGGGLVQPGGSLRLSCAA | 257 | DIVMTQSPSFLSASVGDRVTIT | SARS- | SARS- | Wu, Y., et al., |
| | SGFIVSSNYMSWVRQAPGKGLEW | | CRASQGISSYLAWYQQKPGKA | CoV2 | CoV2 | Science 368: 1274- |
| | VSVIYSGGSTYYADSVKGRFTISRH | | PKLLIYAASTLQSGVPSRFSGS | | | 1278 (2020) |
| | NSKNTLYLQMNSLRAEDTAVYYC | | GSGTEFTLTISSLQPEDFATYY | | | |
| | AREAYGMDVWGQGTTVTVSS | | CQQLNSYPPYTFGQGTKLEIK | | | |
| 258 | QVQLVQSGAEVKKPGASVKVSCK | 259 | DIQMTQSPLSLPVTPGEPASISC | SARS- | SARS- | Wu, Y., et al., |
| | ASGYTFTGYYMHWVRQAPGQGLE | | RSSQSLLDSDDGNTYLDWYLQ | CoV2 | CoV2 | Science 368: 1274- |
| | WMGRINPNSGGTNYAQKFQGRVT | | KPGQSPQLLIYTLSYRASGVPD | | | 1278 (2020) |
| | MTRDTSISTAYMELSRLRSDDTAV | | RFSGSGSGTDFTLKISRVEAED | | | |
| | YYCARVPYCSSTSCHRDWYFDLW | | VGVYYCMQRIEFPLTFGGGTK | | | |
| | GRGTLVTVSS | | VEIK | | | |
| 260 | QVQLVQSGAEVKKPGASVKVSCK | 261 | EIVLTQSPGTLSLSPGERATLSC | SARS- | SARS- | Pinto, D., et al., |
| | ASGYPFTSYGISWVRQAPGQGLEW | | RASQTVSSTSLAWYQQKPGQA | CoV1, | CoV2 | Nature 583: 290-295 |
| | MGWISTYNGNTNYAQKFQGRVT | | PRLLIYGASSRATGIPDRFSGSG | SARS- | and | (2020) |
| | MTTDTSTTTGYMELRRLRSDDTA | | SGTDFTLTISRLEPEDFAVYYC | CoV2 | SARS- | |
| | VYYCARDYTRGAWFGESLIGGFD | | QQHDTSLTFGGGTKVEIK | | CoV1 | |
| | NWGQGTLVTVSS | | | | | |
| 262 | EVQLVESGGGLVQPGGSLRLSCAA | 263 | DIQMTQSPSSLSASVGDRVTIT | SARS- | SARS- | Meulen, J., et al., |
| | SGFTFSDHYMDWVRQAPGKGLEW | | CRASQSISSYLNWYQQKPGKA | CoV1 | CoV1 | (2006), PLoS |
| | VGRTRNKANSYTTEYAASVKGRF | | PKLLIYAASSLQSGVPSRFSGS | | | Medicine, Vol. 3(7): |
| | TISRDDSKNSLYLQMNSLKTEDTA | | GSGTDFTLTISSLQPEDFATYY | | | e237, 1071-1079 |
| | VYYCARGISPFYFDYWGQGTLVT | | CQQSYSTPPTFGQGTKVEIK | | | |
| | VSS | | | | | |
| 264 | QVQLVESGGGLVKPGGSLRLSCAA | 265 | DIQMTQSPSSLSASVGDRVTIT | SARS- | SARS- | U.S. patent |
| | SGFTFSDYYMSWIRQAPGKGLEW | | CQASQDITNYLNWYQQKPGK | CoV2 | CoV2 | application |
| | VSYITYSGSTIYYADSVKGRFTISR | | APKLLIYAASNLETGVPSRFSG | | | Ser. No. |
| | DNAKSSLYLQMNSLRAEDTAVYY | | SGSGTDFTFTISGLQPEDIATYY | | | 10/787,501 |
| | CARDRGTTMVPFDYWGQGTLVTV | | CQQYDNLPLTFGGGTKVEIK | | | |
| | SS | | | | | |
| 266 | QVQLVESGGGVVQPGRSLRLSCA | 267 | QSALTQPASVSGSPGQSITISCT | SARS- | SARS- | U.S. patent |
| | ASGFTFSNYAMYWVRQAPGKGLE | | GTSSDVGGYNYVSWYQQHPG | CoV2 | CoV2 | application |
| | WVAVISYDGSNKYYADSVKGRFTI | | KAPKLMIYDVSKRPSGVSNRF | | | Ser. No. |
| | SRDNSKNTLYLQMNSLRTEDTAV | | SGSKSGNTASLTISGLQSEDEA | | | 10/787,501 |
| | YYCASGSDYGDYLLVYWGQGTLV | | DYYCNSLTSISTWVFGGGTKL | | | |
| | TVSS | | TVL | | | |
| 268 | QVQLVQSGAEVKKPGSSVKVSCK | 269 | DIQMTQSPSSLSASVGDRVTIT | SARS- | SARS- | INN Proposed List |
| | ASGGTFSNYAISWVRQAPGQGLE | | CRASQSISSYLSWYQQKPGKA | CoV2 | CoV2 | P124 |
| | WMGRIIPILGIANYAQKFQGRVTIT | | PKLLIYAASSLQSGVPSRFSGS | | | (who.int/medicines/ |
| | ADKSTSTAYMELSSLRSEDTAVYY | | GSGTDFTLTITSLQPEDFATYY | | | publications/ |
| | CARGYYEARHYYYYYAMDVWGQ | | CQQSYSTPRTFGQGTKVEIK | | | druginformation/ |
| | GTAVTVSS | | | | | innlists/PL124- |
| | | | | | | COVID.pdf) |
| 270 | EVQLLESGGGVVQPGGSLRLSCAA | 271 | DIVMTQSPLSLPVTPGEPASISC | SARS- | SARS- | Shuo Du et al., 2020 |
| | SGFAFTTYAMNWVRQAPGRGLEW | | RSSQSLLHSNGYNYLDWYLQ | CoV2 | CoV2 | (biorxiv.org/content/ |
| | VSAISDGGGSAYYADSVKGRFTIS | | KPGQSPQLLIYLGSNRASGVPD | | | 10.1101/ |
| | RDNSKNTLYLQMNSLRAEDTAVY | | RFSGSGSGTDFTLKISRVEAED | | | 2020.07.09.195263) |
| | YCAKTRGRGLYDYVWGSKDYWG | | VGVYYCMQALQTPGTFGQGT | | | |
| | QGTLVTVSS | | RLEIK | | | |
| 272 | QVQLVQSGAEVKKPGASVKVSCK | 273 | QSALTQPPSASGSPGQSVTISC | SARS- | SARS- | Lihong Liu et al., |
| | ASGYTFTGYYMHWVRQAPGQGLE | | TGTSSDVGGYNYVSWYQQHP | CoV2 | CoV2 | 2020 |
| | WMGWINPNSGGTNYTQMFQGRV | | GKAPKLMIYEVSKRPSGVPDR | | | (nature.com/articles/ |
| | TMTRDTSISTAYMEVSRLRSDDTA | | FSGSKSGNTASLTVSGLQAED | | | s41586-020-2571-7) |
| | VYYCARDRSWAVVYYYMDVWG | | EADYYCSSYAGSNNLVFGGGT | | | |
| | KGTTVTVSS | | KLTVL | | | |
| 274 | QITLKESGPTLVKPTQTLTLTCTFS | 275 | QSALAQPASVSGSPGQSITISCT | SARS- | SARS- | Lihong Liu et al., |
| | GFSLSTSGVGVGWIRQPPGKALEW | | GTSSDVGAYNYVSWYQQHPG | CoV2 | CoV2 | 2020 |
| | LALIYWDDDKRYSPSLKSRLTITK | | KAPKLMIYDVSKRPSGVSNRF | | | (nature.com/articles/ |
| | DTSKNQVVLTMTNMDPVDTATYY | | SGSKSGNTASLTISGLQAEDEA | | | s41586-020-2571-7) |
| | CAHHKIERIFDYWGQGTLVTVSS | | DYYCSSYTTSSTVFGGGTKLT | | | |
| | | | VL | | | |
| 276 | QVQLVQSGAEVKKPGASVRVSCK | 277 | QSALTQPASVSGSPGQSITISCT | SARS- | SARS- | Lihong Liu et al., |
| | ASGYTFTGYYMHWVRQAPGQGLE | | GTSSDVGGYNFVSWYQQHPG | CoV2 | CoV2 | 2020 |
| | WMGWINPISDGTNYAQKFQGWVT | | KAPKLMIYDVSKRPSGVSNRF | | | (nature.com/articles/ |
| | MTRDTSISTVYMELSRLRSDDTAV | | SGSKSGNTASLTISGLQAEDEA | | | s41586-020-2571-7) |
| | YYCARGGSRCSGGNCYGWAYDA | | DCYCSSYTSSSTFVFGTGTKVT | | | |
| | FDIWGQGTMITVSS | | VL | | | |
| 278 | QVQLVQSGAEVKKPGSSVKVSCK | 279 | EIVMTQSPATLSVSPGERATLS | SARS- | SARS- | Lihong Liu et al., |
| | ASGGTFSSYAISWVRQAPGQGLEW | | CRASQSVSSDLAWYQHKPGQ | CoV2 | CoV2 | 2020 |
| | MGGNIPIFGTANYAQKFQGRVTIT | | APRLLIYGASTRATGIPVRFSG | | | (nature.com/articles/ |
| | ADESTSTAYMELSSLRSEDTAVYY | | SGSGTEFTLTISSLQSEDFAVY | | | s41586-020-2571-7) |
| | CARGVGYRGVIPLNWFDPWGQGT | | YCQQYNNWPPFTFGGGTKVEI | | | |
| | VVTVSS | | K | | | |
| 280 | QVQLVQSGAEVKKPGASVKVSCK | 281 | QSALTQPASVSGSPGQSITISCT | SARS- | SARS- | Lihong Liu et al., |
| | ASGYTFTGYYMHWVRQAPGQGLE | | GTSSDVGGYNYVSWYQQHPG | CoV2 | CoV2 | 2020 |
| | WMGWINPNSGGTNYAQKFQGRV | | KAPKLMIYDVSKRPSGVSNRF | | | (nature.com/articles/ |
| | TMTRDTSITTAYMELRRLRSDDTA | | SGSKSGNTASLTISGLQAEDEG | | | s41586-020-2571-7) |
| | VYYCARGLGVGCSGGNCYLDYYY | | DYYCSSYTSSSTWVFGGGTKL | | | |
| | MDVWGKGTTVTVSS | | TVL | | | |
| 282 | QVQLVQSGAEVKKAGSSVKVSCK | 283 | SYELTQPPSVSVSPGQTASITCS | SARS- | SARS- | Lihong Liu et al., |
| | ASGGTFSSHTITWVRQAPGQGLEW | | GDKLGDKYACWYQQKPGQSP | CoV2 | CoV2 | 2020 |
| | MGRIIPILGIANYAQKFQGRVTITA | | VLVIYQDNKRPSGIPERFSGSN | | | (nature.com/articles/ |
| | DKSTSTAYMELSSLRSEDTAVYYC | | SGNTATLTISGTQAMDEADYY | | | s41586-020-2571-7) |
| | ASLQTVDTAIEKYYGMDVWGQGT | | CQAWDSSTAVFGGGTKLTVL | | | |
| | TVTVSS | | | | | |
| 284 | EVQLVESGGGLVQPGGSLRLSCAA | 285 | QSVLTQPPSVSGAPGQRVTISC | SARS- | SARS- | Rodda, L., 2021 (pub. |
| | SEITVSSNYMSWVRQAPGKGLEW | | TGSSSNIGAGYDVHWYQQLPG | CoV2 | CoV2 | 2020), Cell, doi: |
| | VSLIYSGGSTFYADSVKGRFIISRD | | TAPKLLIYGNSNRPSGVPDRFS | | | 10.1016/ |
| | NSKNTLYLQMNSLRAEDTAVYHC | | GSKSGTSASLAITGLQAEDEAD | | | j.ce11.2020.11.029 |
| | ARGGEEPLPFDPWGQGTLVTVSS | | YYCQSYDSSLSVSVVFGGGTK | | | |
| | | | LTVL | | | |
| 286 | QVQLVQSGAEVKKPGSSVKVSCK | 287 | QSVLTQPPSVSGAPGQRVIISC | SARS- | SARS- | Rodda, L., 2021 (pub. |
| | ASGGTFSSYPISWVRQAPGQGLEW | | TGSNSNIGAGYDVHWYQQLP | CoV2 | CoV2 | 2020), Cell, doi: |
| | MGRIIPILRVANFAQRFEGRVTITA | | GTAPKLLIYGNNNRPSGVPDR | | | 10.1016/ |
| | DKSTGTAYMELSSLRSEDTAMYY | | FSGSKSGTSASLAITGLQAEDG | | | j.cell.2020.11.029 |
| | CARDEAQTTVNTNWFDPWGQGTL | | ADYYCQSYDSSLSDVVFGGGT | | | |
| | VTVSS | | KLTVL | | | |
| 288 | EVQLVESGGGLVQPGGSLRLSCAV | 289 | DIQMTQSPSSLSASVGDRVTIT | SARS- | SARS- | Rodda, L., 2021 (pub. |
| | SGFTVSSNYMSWVRQAPGKGLEW | | CRASQSISNYLNWYHQKPGKA | CoV2 | CoV2 | 2020), Cell, doi: |
| | VSVIYTGGGTYYADSVKGRFTISR | | PKLLIYAASSLQSGVPSRFSGS | | | 10.1016/ |
| | DNSKNTLYLQMNTLRAEDTTVYY | | GSGTDFTLTISSLQPEDFATYY | | | j.cell.2020.11.029 |
| | CARGDGSYYRAFDYWGQGTLVTV | | CQQSYSPPPTFGPGTKVEIK | | | |
| | SS | | | | | |
| 290 | EVQLVESGGGLIQPGGSLRLSCAA | 291 | DIQMTQSPSSLSASVGDRVTIT | SARS- | SARS- | Rodda, L., 2021 (pub. |
| | SGFTVSRNYMNWVRQAPGKGLE | | CRASQSISSYLNWYQQKPGKA | CoV2 | CoV2 | 2020), Cell, doi: |
| | WVSVIYSGGSTFYADSVKGRFTISR | | PKLLIYASSSLQRGVPSRFSGS | | | 10.1016/ |
| | DNSKNTLYLQMNSLRAEDTAVYY | | GSGTDFTLTISSLQPEDFATYY | | | j.cell.2020.11.029 |
| | CARDASSYGIDWGQGTLVTVSS | | CQQSYSTPPITFGQGTRLEIK | | | |
| 292 | QVQLKQSGPGLVAPSQSLSITCTVS | 293 | QAVVTQESALTTSPGETVTLT | SARS- | SARS- | Alsoussi, W., 2020, |
| | GFSLINYAISWVRQPPGKGLEWLG | | CRSSTGAVTTSNYANWVQEKP | CoV2 | CoV2 | J Immunol, 205: 915- |
| | VIWTGGGTNYNSALKSRLSISKDN | | DHLFTGLIGGTNNRAPGVPAR | | | 922 |
| | SKSQVFLKMNSLQTDDTARYYCA | | FSGSLIGDKAALTITGAQTEDE | | | |
| | RKDYYGRYYGMDYWGQGTSVTV | | AIYFCALWYNNHWVFGGGTK | | | |
| | SS | | LTVL | | | |
| 294 | EVQLVQSGPEVKKPGTSVKVSCKA | 295 | EIVLTQSPGTLSLSPGERATLSC | SARS- | SARS- | Aaron Schmitz et al., |
| | SGFTFSSSAVQWVRQARGQRLEWI | | RASQSVSSSYLAWYQQKPGQ | CoV2 | CoV2 | 2021 |
| | GWIVVGSGNYAQKFQERVTITRD | | APRLLICATSSRATGIPDRFSGS | | | (biorxiv.org/content/ |
| | MSTNTAYMELSSLRSEDTAVYYC | | GSGTDFTLTIRRLEPEDFALYY | | | 10.1101/ |
| | AAAYCSGGSCSDGFDIWGQGTMV | | CQQYGSSPWTFGQGTKVEIK | | | 2021.03.24.436864v1) |
| | TVSS | | | | | |
| 296 | EVQLQQSGAELVKPGASVKLSCTT | 297 | DIVMTQSQKFMSTSVGDRVSV | SARS- | SARS- | PDB |
| | SGFNIIDTYMHWVKQRPEEGLEWI | | TCKASQNVGTHVAWYQQKPG | CoV2;SARS- | CoV2; | (rcsb.org/structure/ |
| | GGIDPVNGNSEYDPKFQDKATITA | | QSPKALIYSASYRYSGVPDRFT | CoV1 | SARS- | 7EAN) |
| | DTSSNTAYLHLSRLTSEDTAVYYC | | GSGVGTDFTLTITNVQSEDLAE | | CoV1 | |
| | ASAHYYGSSSSFPYWGQGTDLVT | | YFCQQYNSYFTFGSGTKLEIK | | | |
| | VSA | | | | | |
| 298 | QVQLQQWGAGLLKPSETLSLTCA | 299 | NFMLTQPHSVSASPGKTVTIPC | SARS- | SARS- | Asarnow et al., 2021, |
| | VYGGSFSGYYWSWIRQPPGKGLE | | TGSSGNIASNYVQWYQQRPGS | CoV2 | CoV2 | Cell 184, 3192-3204 |
| | WIGEINHSGSTNYNPSLKSRVTISV | | APTTVIYEDNQRPSGVPDRFSG | | (weak) | |
| | DTSKNQFSLKLSSVTAADTAVYYC | | SIDSSSNSASLTISGLKTEDEAD | | | |
| | ARRWWLRGAFDIWGQGTTVTVSS | | YYCQSYDNNIQVFGGGTKLTV | | | |
| | | | L | | | |
| 300 | QVQLQESGGGLVQPGGSLRLSCAA | 301 | DIQLTQSPSSLSASVGHRVTITC | SARS- | SARS- | Asarnow et al., 2021, |
| | SGFTFSSYEMNWVRQAPGKGLEW | | RASQSISSYLNWYQQKPGKAP | CoV2 | CoV2 | Cell 184, 3192-3204 |
| | VAVISYDGSNKYYADSVKGRFTIS | | KLLIYAASSLQSGVPSRFSGSG | | | |
| | RDNAKNSLYLQMNSLRAEDTAVY | | SGTDFTLTISSLQPEDFATYYC | | | |
| | YCARLITMVRGEDYWGQGTLVTV | | QQSYNLPRTFGGGTKLEVL | | | |
| | SS | | | | | |
| 302 | EVQLVESGGGLVQPGGSLRLSCAA | 303 | LTQPASVSGSPGQSITISCTGTS | SARS- | SARS- | Cao, Y., et al., Cell |
| | SGVTVSSNYMSWVRQAPGKGLEW | | SDVGSYNLVSWYQQRPGKAP | CoV2 | CoV2 | Research (2021) |
| | VSAVYSGGSTYYADSVKGRFTISR | | KLILYEVTKRPSGVSNRFSGSK | | | 31: 732-741 |
| | HNSKNTLYLQMKSLRPEDTAIYYC | | SGNTASLAISGLQAEDEADYY | | | |
| | ARLINHYYDSSGDGGAFDIWGQGT | | CCSYAGSSTWVFGGGTKLTVL | | | |
| | MVTVSS | | | | | |
| 304 | QVQLVQSGAEVKKPGSSVKVSCK | 305 | EIVLTQSPGTLSLSPGERATLSC | SARS- | SARS- | Scheid et al., Cell |
| | ASGGTFSSYAISWVRQAPGQGLEW | | RASQSVGSGYLAWYQQRPGQ | CoV2 | CoV2 | (2021) 184(12): 3205- |
| | MGRIISMFGIANNAQKFQGRLTITA | | APRLLIYGASSRATGIPDRFSGS | | | 3221.e24 |
| | DTSTSTAYMELSSLRSEDTAVYYC | | GSGTDFTLTISRLEPEDFAVYY | | | |
| | ARGPYYYDSGGYYLDYWGQGTL | | CQQYAGSPRTFGQGTRLEIK | | | |
| | VTVSS | | | | | |
| 306 | EVQLVESGGGLIQPGGSLRLSCAA | 307 | EIVLTQSPGTLSLSPGERATLSC | SARS- | SARS- | Scheid et al., 2021, |
| | SGITVVRNYMTWVRQAPGKGLEW | | RASQSVPSSYLAWYQQKPGQ | CoV2 | CoV2 | Cell 184, 3205-3221 |
| | VSVIYSGGTTYYADSVKGRFTISRD | | APRLLIYGASSRATGIPDRFSGS | | | |
| | NSKNTMYLQMNSLRAEDTAIYYC | | GSGTDFTLTISRLEPEDFAVYY | | | |
| | ARDLEVVGAMDVWGQGTTVTVS | | CQQYGSPMYTFGQGTKLEIK | | | |
| | S | | | | | |
| 308 | QVQLVQSGAEVKKPGASVKVSCK | 309 | EIVLTQSPGTLSLSPGERATLSC | SARS- | SARS- | Scheid et al., 2021, |
| | ASGYTFTSYAISWVRQAPGQGLE | | RASQSVSGTFLAWYQQKPGQ | CoV2 | CoV2 | Cell 184, 3205-3221 |
| | WMGWVSAYNGNTNYAQKLQGR | | APRLLISGASSRATGIPDRFSGS | | | |
| | VTMTTDTSTNTAYMELRSLRSDDT | | GSGTDFTLTISRLEPEDFAVYY | | | |
| | AIYYCAIPYSSVTFDCWGQGTLVT | | CQQYGSSRPTFGQGTKLEIK | | | |
| | VSS | | | | | |
| 310 | QVQLVQSGAEVKKAGASVKVSCK | 311 | QSVLTQPPSVSGAPGQRVTISC | SARS- | SARS- | Scheid et al., 2021, |
| | ASGYTFTSYDINWVRQASGQGLE | | TGSSSNIGAGYDVHWYHQLPG | CoV2 | CoV2 | Cell 184, 3205-3221 |
| | WMGWMNPISGNTGYAQKFQGRV | | TAPKFLIYGNSNRPSGVPDRFS | | | |
| | TMTRNTSITTAYMELSSLRSEDTA | | GSKSGTSASLAITRLQAEDEAD | | | |
| | VYFCARGGRYCSSTTCYSGVGMD | | YYCQSYDSSLSGWVFGGGTKL | | | |
| | VWGQGTTVTVPSA | | TVL | | | |
| 312 | EVQLVQSGAEVKKPGASVKVSCK | 313 | DIVMTQTPLSSPVTLGQPASIS | SARS- | SARS- | Noy-Porat et al., |
| | VSGYTLTELSMHWVRQAPGKGLE | | CRSSQSLVHSDGNTYLSWLQQ | CoV2 | CoV2 | 2021, iScience |
| | WMGGFDPEDAETIYAQKFQGRVT | | RPGQPPRLLIYKISNRFSGVPD | | | 24, 102479 |
| | MTEDTSTDTAYMELSSLRSEDTAV | | RFSGSGAGTDFTLKISRVEAED | | | |
| | YYCVTAPAITGSPEAYSYYYGMD | | VGVYYCMQATQFPYTFGQGT | | | |
| | VWGQGTTVTVSS | | KLEIK | | | |
| 314 | QVQLVQSGAEVKKPGASVKVSCK | 315 | SYELIQEPSVSVSPGQTARITCQ | SARS- | SARS- | Noy-Porat et al., |
| | VSGYTLPELSMHWVRQAPGKGLE | | GDSLRSYYASWYQQKPGQAP | CoV2 | CoV2 | 2021, iScience |
| | WMGGFDPEDGETIYAQKFQGRVT | | VLVIYNRNKRPSGIPDRFSGSS | | | 24, 102479 |
| | MTEDTSTDTAYMELSSLRSEDTAV | | SGNTASLTITGAQADDEADYY | | | |
| | YYCATGPAIAAAATGWFDPWGQG | | CNSRDNSGNHPFGGGTKVTVL | | | |
| | TLVTVSS | | | | | |
| 316 | QVQLQQSGAEVKKPGASVKVSCK | 317 | DIVMTQSPLSSPVTLGQPASISC | SARS- | SARS- | Noy-Porat et al., |
| | VSGYTLTELSMHWVRQAPGKGLE | | RSSQSLVHSDGNTYLSWLQQR | CoV2 | CoV2 | 2021, iScience |
| | WMGGFDPEDAETIYAQKFQGRVT | | PGQPPRLLIYKISNRFSGVPDRF | | | 24, 102479 |
| | MTEDTSTDTAYMELSSLRSEDTAV | | SGSGATDFTLKISRVEAEDVG | | | |
| | YYCVTAPVITGSPEAYSYYYGMD | | VYYCMQATQFPITFGGGTKVE | | | |
| | VWGQGTTVNVSS | | IK | | | |
| 318 | QMQLVQSWGRRGPAGRSLRLSCA | 319 | EIVLTQSPGTLSLSPGERATLSC | SARS- | SARS- | Noy-Porat et al., |
| | ASGSTFSSYGMHWVRQAPGKGLE | | RASQSVSSSYLAWYQQKPGQ | CoV2 | CoV2 | 2021, iScience |
| | WVAVISFDGSNKFYADSVKGRFTI | | APRLLIYGASSRATGIPDRFSGS | | | 24, 102479 |
| | SRDNSKNTLYLQMNSLRAEDTAV | | GSGTDFTLTISRLEPEDFAVYY | | | |
| | YYCAKDHDDGYYFYYYMDVWG | | CQQYGSSRTFGGGTRLEIK | | | |
| | KGTTVTVSS | | | | | |
| 320 | EVQLVQSGAEVKKPGASVKVSCK | 321 | QSVVTQPASVSGSPGQSITISCT | SARS- | SARS- | Noy-Porat et al., |
| | VSGYTLTELSMHWVRQAPGKGLE | | GSSSDIGGYNYVSWYQQHPGK | CoV2 | CoV2 | 2021, iScience |
| | WMGGFDPEDGETIYAQKFQGRVT | | APKLMIFEGSKRPSGVPDRFSG | | | 24, 102479 |
| | MTEDTSTDTAYMELSSLRSEDTAV | | SKSGNTASLTISGLQAEDEADY | | | |
| | YYCAASPAVRGSPSNFYYYHGMD | | YCSSYTSSSTLVFGGGTELTVL | | | |
| | VWGQGTMVTVSS | | | | | |
| 322 | QVQLQQSGAEVKKPGASVRVSCK | 323 | SQSALTQPGSLSGSPGQSITISC | SARS- | SARS- | Noy-Porat et al., |
| | VSGYTLTELSMHWVRQAPGKGLE | | TGTSSDVGSYNLVSWYQQHP | CoV2 | CoV2 | 2021, iScience |
| | WMGGFDPEDAETIYAQKFQGRVT | | GQTPKVIIYEVTNRASGVSNRC | | | 24, 102479 |
| | MTEDTSTDRAYMELSSLRSEDTAV | | SGSQSGNTATLTISRLLADDQA | | | |
| | YYCVAAPVITGSPEAYSYYYGMD | | DDYCSSYTRTSTLDVVFGGRT | | | |
| | VWGQGTTVTVSS | | ELTVL | | | |
| 324 | QLQLQESGPGLVKPSQTLSLTCTVS | 325 | NILTQPPSASGTPGQRVTISCSG | SARS- | SARS- | Noy-Porat et |
| | GGSISSGSYYWSWIRQPAGKGLEW | | SSSNIGSNTVN | CoV2 | CoV2 | al.,2021, iScience |
| | IGRIYTTGSTSYNPSLKSRVTISVDT | | WYQQLPGTAPKLLIYSKNQRP | | | 24,102479 |
| | SKNQFSLKLSSVTAADTAVYYCAR | | SGVPDRFSGSKSGTSASLAISG | | | |
| | MAYQVYYYDSSGYYDAFDIWGQ | | LRSEDEADYYCSAWDDSLRG | | | |
| | GTMVTVSS | | YVFGPGTKVTVL | | | |
| 326 | QVQLQESGPGLVKPSQTLSLTCTV | 327 | QSALTQPASASGSPGQSVTISC | SARS- | SARS- | Noy-Porat et al., |
| | SGGSISSGSYYWSWIRQPAGKGLE | | TGSSSDVGGYNFVSWYQQHP | CoV2 | CoV2 | 2021, iScience |
| | WIGRIYTTGSTNYNPSLKSRVTISV | | GKAPKLIIYEVSKRPSGVPNRF | | | 24, 102479 |
| | DTSKNQFSLKLSSVTAADTAVYYC | | SGSKSGNTASLTVSGLQADDE | | | |
| | ARMAYQVYYYDSSGYYDAFDIW | | ALYYCSSYAGSNNYVFGPGTK | | | |
| | GQGTMVTVSS | | VTVL | | | |
| 328 | EVQLVQSGAEVKKPGASVKVSCK | 329 | QSVLTQPASVSGSPGQSITISCT | SARS- | SARS- | Noy-Porat et al., |
| | VSGYTLPELSMHWVRQAPGKGLE | | GTSSDVGGYNYVSWYQQHPG | CoV2 | CoV2 | 2021, iScience |
| | WMGGFDPEDGGTIYAQKFQGRVT | | KAPKLMIYDVSNRPSGVPDRF | | | 24, 102479 |
| | MTEDTSTDTAYMELSSLRSEDTAV | | SGSKSGNTASLTISGLQAEDEA | | | |
| | YYCATSRVAGTPNWFHPWGQGTL | | DYYCSSYTSSSTLVFGTGTKVT | | | |
| | VTVSS | | VL | | | |
| 330 | EVQLLESGGGVVQPGRSLRLSCAA | 331 | NFMLTQPPSVSVSPGQTASITC | SARS- | SARS- | Noy-Porat et al., |
| | SGFTFSSYAMHWVRQAPGKGLQW | | SGDKLGDKYASWYQQKPGQS | CoV2 | CoV2 | 2021, iScience |
| | VALISYDGSNKYYADSVKGRFTIS | | PVLVIYQDSKRPSGIPERFSGSN | | | 24, 102479 |
| | RDNSKNTLYLQMNSLRAEDTAVY | | SGNTATLTISGTQAMDEADYY | | | |
| | YCARDLGSGWYPWGQGTLVTVSS | | CQAWDSSTVVFGGGTELTVL | | | |
| 332 | QVQLVQSGAGVKKPGASVKVSCK | 333 | QSALTQPVSVSGSPGQSITISCT | SARS- | SARS- | Noy-Porat et al., |
| | VSGYTLPELSMHWVRQAPGKGLE | | GTSSDVGRYNYVSWYQQHPG | CoV2 | CoV2 | 2021, iScience |
| | WMGGFDPEDGETIYAQKFQGRVT | | KAPKLITYDVKNRPSGVPDRFS | | | 24, 102479 |
| | MTEDTSTDTAYMELSSLRSEDTAV | | GSKSGNTASLTISGLQAEDEAD | | | |
| | YYCATSRVAGTPNWFHPWGQGTL | | YYCSSYTRSSTLDVVFGGGTE | | | |
| | VTVSS | | LTVL | | | |
| 334 | EVQLVESGGGLVQPGGSLRLSCAA | 335 | AIQMTQSPSFLSASVGDRVTIT | | | Andreano et al., |
| | SGLTVSSNYMSWVRQAPGKGLEW | | CRASQGISSYLAWYQQKPGKA | | | 2021, Cell, |
| | VSVIYSGGSTFYADSVKDRFTISRD | | PKLLIYAASTLQSGVPSRFSGS | | | 184(7): 1821-1835 |
| | NSKNTLYLQMNSLRAEDTAVYYC | | GSGTEFTLTISSLQPEDFATYY | | | |
| | VRDLYSYGMDVWGQGTTVTVSS | | CQQVNSYPTFGQGTRLEIK | | | |
| 336 | EVQLQQWGAGLLKPSETLSLTCAV | 337 | EIVLTQSPATLSLSPGERATLSC | SARS- | SARS- | Song et al., 2021, |
| | YGGSFSGYYWSWIRQPPGKGLEWI | | RASQSVSSYLAWYQQKPGQA | CoV2 | CoV2 | Communications |
| | GEVNHSGSTNYNPSLKSRVTISVD | | PRLLIYDASNRATGIPARFSGS | | | Biology volume 4, |
| | TSKNQLSLKLNSVTAADTAVYYC | | GSGTDFTLTISSLEPEDFAVYY | | | Article number: 500 |
| | ARGNTMVRGVIIPFEYWDKGTLVT | | CQQRSNWPLTFGGGTKVEIK | | | (2021) |
| | VSS | | | | | |
| 338 | EVQLLESGGGLVQPGGSLRLSCAA | 339 | SYELTQPPSVSVSPGQTARITC | SARS- | SARS- | Panpan Zhou et al., |
| | SGFTFSSYVMTWARQAPGKGLEW | | SGDALPKRYAYWYQQKSGQA | CoV2 | CoV2 | 2021 |
| | VSAISGTGYTYYADSVKGRFTVSR | | PILVIYEDKKRPSGIPERLSGSK | | | (biorxiv.org/content/ |
| | DNSKNTLFLQMSSLRAEDTAVYY | | SGTVATLTISGAQVEDEADYY | | | 10.1101/ |
| | CAITMAPVVWGQGTTVTVSS | | CYSTDSSGNHAVFGGGTQLTV | | | 2021.03.30.437769v1) |
| | | | L | | | |
| 340 | QVQLVESGGGLVKPGGSLRLSCAA | 341 | EIVLTQSPATLSLSPGERATLSC | SARS- | SARS- | Voss et al., 2021, |
| | SGFTFSDYYMSWIRQAPGKGLEW | | RASQSVSTYLAWYQQKPGQA | CoV2 | CoV2 | Science, 372(6546): |
| | VSSIDGSTSYTKYADSVKGRFTISR | | PRLLIFDASNRATGIPARFSGSG | | | 1108-1112 |
| | DNAKNSLYLQMNSLRAEDTAVYY | | SGTDFTLTISSLEPEDFAVYYC | | | |
| | CARVGPAVAGSPFDSWGQGTLVT | | QQRSNWLFSFGPGTKVDIK | | | |
| | VSS | | | | | |
| 342 | QVQLVQSGPEVKKPGASVKVSCQ | 343 | QSVLTQPASVSASPGQSITISCT | SARS- | SARS- | Voss et al., 2021, |
| | TSGYSFSDHYLHWVRQTPGQGFE | | GTSSDVGGYDYVSWYQHHPD | CoV2 | CoV2 | Science, |
| | WMGWIKPKSGATNSADNFQDRVT | | NAPKLLIFEVSNRPSGVSNRFS | | | 372(6546): 1108-1112 |
| | MTADASVNTAYMELSSLRPDDTA | | GSKSGNAASLTISGLLAEDEAD | | | |
| | VYYCARGHRIPSAISDKYDFWGQG | | YFCTSYSSGRTPYVFGTGTKV | | | |
| | TLVTVSS | | TVL | | | |
| 344 | EVQLVESGGGLIQPGGSLRLSCAA | 345 | DVVMTQSPGTLSLSPGERATL | SARS- | SARS- | Dejnirattisai et al., |
| | SGLTVSSNYMSWVRQAPGKGLEW | | SCRASQSVPSSYLAWYQQKPG | CoV2 | CoV2 | 2021, Cell, |
| | VSVIYSGGSTFYADSVKGRFTISRD | | QAPRLLIYGASTRATGIPDRFS | | | 184(11): 2939-2954 |
| | NSKNTLYLQMNSLGAEDTAVYYC | | GSGSGTDFTLTISRLEPEDFAV | | | |
| | ARGEGSPGNWFDPWGQGTLVTVS | | YYCQHYDTSPRFGGGTKVDIK | | | |
| | S | | | | | |
| 346 | EVQLVESGGGLVQPGGSLRLSCAA | 347 | AIQMTQSPSSLSASVGDRVTIT | SARS- | SARS- | Andreano et al., |
| | SGFTVSINYMSWVRQAPGKGLEW | | CRASQDIRNNLGWFQQKPGK | CoV2 | CoV2 | 2021, Cell, |
| | VSVIYSGGSTYYADSVKGRFTISRD | | APKRLIYAASTLQRGVPSRFSG | | | 184(7): 1821-1835 |
| | NSKNTLYLQMNSLRAEDTAVYYC | | SGSGTEFTLTISSLQPEDFATYY | | | |
| | AAPLLWADSYYMDVWGKGTTVT | | CLQHNSYLWTFGQGTKVEIK | | | |
| | VSS | | | | | |
| 348 | QVQLVQSGAEVKKPGPSVKVSCK | 349 | DIVMTQSPAALSVSPGERATLS | SARS- | SARS- | Andreano et al., |
| | ASGGTFSSYTINWVRQAPGQGLE | | CRASQSVSSNLAWYQQKPGQ | CoV2 | CoV2 | 2021, Cell, |
| | WMGRIIPMLGIAKYAQKFQGRVTI | | APRLLIYGASTRATGIPARFSG | | | 184(7): 1821-1835 |
| | TADKSTSTAYMELSSLRSEDTAVY | | SWSGTEFTLTISSLQSEDLAVY | | | |
| | YCARGIVGATPGYFDYWGQGTLV | | YCQQYNNWLTFGGGTKVEIK | | | |
| | TVSS | | | | | |
| 350 | QVQLVQSGAEVKKPGSSVKVSCK | 351 | EIVMTQSPATLSLSPGERATLS | SARS- | SARS- | Andreano et al., |
| | ASGGTFSSYAISWVRQAPGQGLEW | | CRASQSVSSYLAWYQQKPGQ | CoV2 | CoV2 | 2021, Cell, |
| | MGGITPIFHTANYAQKFQGRVTIT | | APRLLIYDASNRATGIPARFSG | | | 184(7): 1821-1835 |
| | ADESTSTVYMELSSLSSEDTAVYY | | SGSGTDFTLTISSLEPEDFAVY | | | |
| | CARETGDQGVTAPFDLWGRGTLV | | YCQLRGNWPPWTFGQGTKVEI | | | |
| | TVSS | | K | | | |
| 352 | QVQLVQSGPEVKKPGTSVKVSCK | 353 | EIVMTQSPGTLSLAPGERATLS | SARS- | SARS- | Andreano et al., |
| | ASGFTFTSSAMQWVRQARGQRLE | | CRASQSVSSSYLGWYQQKPGQ | CoV2 | CoV2 | 2021, Cell, |
| | WIGWIVVGSGNTDYVQKFQGRVTI | | APRLLIYGASSRATGIPDRFSGS | | | 184(7): 1821-1835 |
| | TRDMSTSTAYMELSSLRSEDTAVY | | GSGTDFTLTISRLEPEDFAVYY | | | |
| | YCAAPYCSSTTCHDGFDIWGQGT | | CQQYGRSPWTFGQGTKVEIK | | | |
| | MVTVSS | | | | | |
| 354 | QVQLVQSGAEVKKPGSSVKVSCK | 355 | EIVMTQSPATLSLSPGERATLS | SARS- | SARS- | Andreano et al., |
| | ASGGTFSSYTISWVRQAPGQGLEW | | CRASQSVSSYLAWYQQKPGQ | CoV2 | CoV2 | 2021, Cell, |
| | MGRIIPILDRVMYAQKFQGRVTITA | | APSLLIYDASNRATGIPARFSG | | | 184(7): 1821-1835 |
| | DKSTSTAYMELSSLRSEDTAVYYC | | SGSGTDFTLTISSLEPEDFAVY | | | |
| | ARRAIDSDTYVEQSHFDYWGQGT | | YCQQPLTFGGGTKVEIK | | | |
| | LVTVSS | | | | | |
| 356 | QVQLQESGAEVKKPGSSVKVSCK | 357 | EIVMTQSPATLSLSPGERATLS | SARS- | SARS- | Andreano et al., |
| | ASGGTFSSYAINWVRQAPGQGLE | | CRASQSVSSFLAWYQQKPGQA | CoV2 | CoV2 | 2021, Cell, |
| | WMGGLIPIFGTANYAQKFQGRVTI | | PRLLIYDASNRATGIPARFSGS | | | 184(7): 1821-1835 |
| | TADESTSTAYMELSSLRSEDTAVY | | GSGTDFTLTISSLEPEDFAVYY | | | |
| | YCANFIGDGYNYEEDYMDVWGK | | CQQRSNWPPFTFGPGTKVDIK | | | |
| | GTTVTVSS | | | | | |
| 358 | EVQLVESGGGLVKPGGSLRLFCAA | 359 | DIVMTQSPSSLSASVGDRVTIT | SARS- | SARS- | Andreano et al., |
| | SGFTFSDYYMSWFRQAPGKGLEW | | CQASQDISNYLNWYQQKPGK | CoV2 | CoV2 | 2021, Cell, |
| | VSYISSSGSNIYYADSVKGRFTVSR | | APKLLIYDASNLQTGVPSRFSG | | (weak) | 184(7): 1821-1835 |
| | DNAKNSLYLQMNSLRAEDTAVYF | | SGSGTDFTFTISSLQPEDIATYY | | | |
| | CARGRLWGWFDPWGQGTLVTVSS | | CQQYDHLLITFGQGTRLEIK | | | |
| 360 | QITLKESGPTLVKPTQTLTLTCTFS | 361 | QSALTQPASVSGSPGQSITISCT | SARS- | SARS- | Kathryn Westendorf |
| | GFSLSISGVGVGWLRQPPGKALEW | | ATSSDVGDYNYVSWYQQHPG | CoV | CoV2 | et al., 2021 |
| | LALIYWDDDKRYSPSLKSRLTISKD | | KAPKLMIFEVSDRPSGISNRFS | | | (biorxiv.org/content/ |
| | TSKNQVVLKMTNIDPVDTATYYC | | GSKSGNTASLTISGLQAEDEAD | | | 10.1101/ |
| | AHHSISTIFDHWGQGTLVTVSS | | YYCSSYTTSSAVFGGGTKLTVL | | | 2021.04.30.442182v3) |
| 362 | QVQVVQSGAEVKKPGASVKVSCK | 363 | QSALTQPASVSGSPGQSITISCT | SARS- | SARS- | Cao et al., 2021, |
| | VSGYTLIEISIHWVRQAPGKGLEW | | GTSSDVGSYNYVSWYQQHPG | CoV2 | CoV2 | Cell Research (2021) |
| | MGGFDPEAGETIYAQKFQGRVTM | | KAPKLMIYDVTKRPSGVPDRF | | | 0: 1-10; doi: |
| | TEDTSTDTAYMEVSSLRSEDTAVY | | SGSKSGNTASLTISGLQAEDEA | | | 10.1038/s41422-021- |
| | YCATGPAIAAAETNWFDLWGQGT | | DYYCSSYTSSSTWVFGGGTKL | | | 00514-9 |
| | LVTVSS | | TVL | | | |
| 364 | EVQLVESGGGLVKPGGSLRLSCAA | 365 | SYELTQPPSVSVSPGQTATITCS | SARS- | SARS- | Cao et al., 2021, Cell |
| | SEFTFSSYSMNWVRQAPGKGLEW | | GDKLGDKYACWYQQRPGQSP | CoV2 | CoV2 | Research (2021) 0: 1- |
| | VSSISSSGSQIYYADSVKGRFTISRD | | VLVIYQDSKRPSGIPERFSGSNS | | | 10; doi: |
| | NAKKSLYLQMNSLRVEDTAVYYC | | GNTATLTIGGTQAMDEAAYFC | | | 10.1038/s41422-021- |
| | ATNGGAHSSTWSFYGMDVWGQG | | QAWDSNTGVFGGGTKLTVL | | | 00514-9 |
| | TTVTVSS | | | | | |
| 366 | EVQLVESGGGLVKPGGSLRLSCAA | 367 | AIRMTQSPSSLSASVGDRVTIT | SARS- | SARS- | Rosa et al., 2021, |
| | SGFSFSSYSMNWVRQAPGKGLEW | | CQASQDISNYLNWYQQKPGK | CoV2 | CoV2 | Science Advances |
| | VSSISSNSNYIYYADSMKGRFTISR | | APKLLIYDASNLETGVPSRFSG | | | (2021): Vol. 7, no. |
| | DNAKNSLYLQMNSLRAEDTAVYY | | SGSGTDFTFTISSLQPEDIATYY | | | 22, eabg7607 |
| | CASNRSPYDSSNYYFDYWGQGTR | | CQHHDSLPLTFGGGTKVEIK | | | |
| | VTISS | | | | | |
| 368 | EVQLVESGGGVVQPGRSLRLSCAA | 369 | DIVMTQSPLSLPVTPGEPASISC | SARS- | SARS- | Fu et al., PLOS |
| | SGFTFSYYGMHWVRQAPGKGLEW | | RSSQSLLHSNGYNYLDWYLQ | CoV2 | CoV2 | Biology, (2021), doi: |
| | VAVIWYDGSNRFYADSVKGRFTIS | | KPGQSPQLLIYLGSNRASGVPD | | | 10.1371/journal.pbio. |
| | RDNSKSTLYLQMNSLRAEDTAVY | | RFSGSGSGTDFTLKISRVEAED | | | 3001209 |
| | YCATDPPGLRFRFDYWGQGTLVT | | VGVYYCMQGLQTPLTFGGGT | | | |
| | VSS | | KVEIK | | | |
| 370 | EVQLQQSGPELVKPGASVKISCKT | 371 | DIVMTQSQKFMSTSVGDRVSV | SARS- | SARS- | Fu et al., PLOS |
| | SGYTFTEYTMHWVKQSHGKSLEW | | TCKASQNVGTNVAWYQQKPG | CoV2 | CoV2 | Biology, (2021), doi: |
| | IGGINPNNGDNTYNQKLKGKATLT | | QSPKPLIYSASSRYSGVPDRFT | | | 10.1371/journal.pbio. |
| | VHKSSSTAYMELRSLTSEDSAVYY | | GSGSGTDFTLTISNVQSEDLAE | | | 3001209 |
| | CARDGYPYYYALDYWGQGTSVT | | YFCQQYNNYPWTFGGGTKLEI | | | |
| | VSS | | K | | | |
| 372 | QVQLVQSGAEVKKPGASVKLSCK | 373 | DIVLTQSPASLAVSPGQRATIT | SARS- | SARS- | Fu et al., PLOS |
| | ASGYSFTSYWVNWVRQAPGQGLE | | CRASESVDSYGNSFMHWYQQ | CoV2 | CoV2 | Biology, (2021), doi: |
| | WIGMIHPSDSETRLNQKFKDRVTIT | | KPGQPPKLLIYRASNLESGIPA | | | 10.1371/journal.pbio. |
| | VDKSTSTAYMELSSLRSEDTAVYY | | RFSGSGSGTDFTLTINPVEAND | | | 3001209 |
| | CARADGYEWYFDVWGRGTLVTV | | VANYYCQQSNEDPWTFGQGT | | | |
| | SS | | KVEIK | | | |
| 374 | QVQLQQSGAELVKPGASVKLSCK | 375 | DIVLTQSPASLAVSLGQRATIS | SARS- | SARS- | Guo et al., JBC |
| | ASGYTFTSYYIYWMKQRPGQGLE | | CRASESVEYYGTGLMQWYQQ | CoV2 | CoV2 | (2021), 296 |
| | WIGEINPNNGGTNFNEKFKSKATL | | KPGQPPKLLIYAASNVESGVPA | | | (100346): 1-9 |
| | TVDKSSSTAYMQLSSLTSEDSAVY | | RFSGSGSGTDFSLNIHPVEEDDI | | | |
| | YCTRGHSDYWGQGTTLTVSS | | AMYFCQQTRKVPYTFGGGTK | | | |
| | | | LEIK | | | |
| 376 | EVQLVESGGGLVNPGGSLRLSCAA | 377 | VTQPASVSGSPGQSITISCTGTS | SARS- | SARS- | rcsb.org/structure/ |
| | SGFTFSDYTIHWVRQAPGKGLEW | | SDVGGYNYVSWYQQHPGKAP | CoV2 | CoV2 | 7LXX |
| | VSSISSSSNYIYYADSVKGRFTISRD | | KLMIYDVSDRPSGVSNRFSGS | | | |
| | NAKNSLSLQMNSLRAEDTAVYYC | | KSGNTASLTISGLQAEDEADY | | | |
| | ARDGNAYKWLLAENVRFDYWGQ | | YCSSYTSSSTPNWVFGGGTKL | | | |
| | GTLVTVSS | | T | | | |
| 378 | VQLVESGGGVVQPGRSLRLSCAAS | 379 | YELTQPPSVSVSPGQTARITCS | SARS- | SARS- | rcsb.org/structure/ |
| | GFTFSSYGMHWVRQAPGKGLEWV | | GDALAKHYAYWYRQKPGQAP | CoV2 | CoV2 | 71y0 |
| | TVIWYDGSNRYYADSVKGRFTISR | | VLVIYKDSERPSGIPERFSGSSS | | | |
| | DNSKNTLYLQMDSLRAEDTAVYY | | GTTVTLTISGVQAEDEADYYC | | | |
| | CARAVAGEWYFDYWGQGTLVTV | | QSADSIGSSWVFGGGTKLTV | | | |
| | S | | | | | |
| 380 | VQLVESGGGVVQPGRSLRLSCAAS | 381 | YELTQPPSVSTARITCGGNNIE | SARS- | SARS- | rcsb.org/structure/ |
| | GFTFSNYGMHWVRQAPGKGLEW | | RKSVHWCQQKPGQAPALVVY | CoV2 | CoV2 | 7LXW |
| | VAVIWYDGSNKFYADSVKGRFTIS | | DDSDRPSGIPERFSGSNSGNTA | | | |
| | RDNSKNSLYLQMNSLRAEDTAVY | | TLTISRVEAGDEADYYCQVWD | | | |
| | FCARAFPDSSSWSGFTIDYWGQGT | | SGSDQVIFGGGTKLT | | | |
| | LVTV | | | | | |
| 382 | QVRLVQSGAEVKKSGESLKISCKG | 383 | QSVLTQPASVSGSPGQSITISCT | SARS- | SARS- | rcsb.org/structure/ |
| | SGYSFTSYWIGWVRQMPGKGLEW | | GISSDVGGYNSVSWYQQHPGK | CoV2 | CoV2 | 7M7W; Starr, TN, et |
| | MGIIYPGDSDTRYSPSFQGQVTISA | | APKLMIYDVTNRPSGVSNRFS | | | al., Nature, 2021 |
| | DKSISTVYLQWSSLKASDTAMYYC | | GSKSGNTASLTISGLQAEDEAD | | | Jul 14. doi: |
| | ARQWSHYTYDYYYWGQGTLVTIS | | YYCSSYTSSSTPPYVFGTGTKV | | | 10.1038/s41586- |
| | S | | SVL | | | 021-03807-6. |
| 384 | QVQLVQSGAEVKKPGSSVKVSCK | 385 | QTVLTQPPSVSGAPGQRVTISC | SARS- | SARS- | rcsb.org/structure/ |
| | ASGGIFNTYTISWVRQAPGQGLEW | | TGSNSNIGAGYDVHWYQQLP | CoV2, | CoV2, | 7MKL; Tortorici et |
| | MGRIILMSGMANYAQKIQGRVTIT | | GTAPKLLICGNSNRPSGVPDRF | SARS- | SARS- | al., Nature doi: |
| | ADKSTSTAYMELTSLRSDDTAVYY | | SGSKSGTSASLAITGLQAEDEA | CoV1 | CoV1 | 10.1038/s41586-021- |
| | CARGFNGNYYGWGDDDAFDIWG | | DYYCQSYDSSLSGPNWVFGG | | | 03817-4(2021) |
| | QGTLVTVYS | | GTKLTVL | | | |
| 386 | QVQLVQSGAEVKKPGASVKVSCK | 387 | DIVMTQTPLSSPVTLGQPASIS | SARS- | SARS- | Peter et al., 2021, |
| | VSGYTLTEVSVHWVRQAPEKGLE | | CRSSQSLVHSDGNTYLSWLQQ | CoV2 | CoV2 | BioRxiv, doi: |
| | WMGGFDPEDAETIYAQKFQGRVT | | RPGQPPRLIIYKVSNRFCGVPD | | | 10.1101/ |
| | MTEDTSTDTAYMELSSLRSEDTAV | | RFSGSGAGTDFTLKISRVEAED | | | 2021.04.16.440101 |
| | YFCATAPAVAGPFYYYYYGMDV | | VGVYYCTQATQFPHTFGQGTK | | | |
| | WGQGTTVTVSS | | LEIK | | | |
| 388 | QVQLVQSGAEVKKPGASVKVSCK | 389 | DIVMTQTPLSSPVTLGQPASIS | SARS- | SARS- | Peter et al., 2021, |
| | VSGYTLTEVSVHWVRQAPGKGLE | | CRSSQSLVHSDGNTYLSWLQQ | CoV2 | CoV2 | BioRxiv, doi: |
| | WMGGFDPEDAKTIYAQKFQGRVT | | RPGQPPRLLIYKVSNRFSGVPD | | | 10.1101/ |
| | MTEDTSTDTAYMELSSLSSEDTAV | | RFSGSGAGTDFTLKISRVEAED | | | 2021.04.16.440101 |
| | YFCATAPAVAGPFYYYYYGMDV | | VGVYYCTQATQFPHTFGQGTK | | | |
| | WGQGTTVTVSS | | LEIK | | | |
| 390 | QVQLVQSGAEVKKPGASVKVSCK | 391 | DIVMTQTPLSSPVTLGQPASIS | SARS- | SARS- | Peter et al., 2021, |
| | VSGYSLIEVSVHWVRQAPGKGLE | | CRSSQSLVHSDGNTYLSWLQQ | CoV2 | CoV2 | BioRxiv, doi: |
| | WMGGFDPENAETIYARGFRGRVT | | RPGQPPRLLIYKVSNRFSGVPD | | | 10.1101/ |
| | MTEDTSTDTAYMELSSLKYEDTA | | RFSGSGAGTEFTLKISRVEAED | | | 2021.04.16.440101 |
| | VYFCATAPAVAGPFYYYYYGMDV | | VGVYYCTQATQFPHTFGQGTK | | | |
| | WGQGTTVTVSS | | LEIK | | | |
| 392 | QVQVVESGGGVVQPGRSLRLSCA | 393 | NIQMTQSPSAMSASVGDSVTIT | SARS- | SARS- | Peter et al., 2021, |
| | ASGFTFSGYGMHWVRQAPGKGLE | | CRARQDINNYLAWFQQKPGK | CoV2 | CoV2 | BioRxiv, doi: |
| | WVAVIWYDGSNQYYADSVKGRFT | | VPKHLIYAASSLLSGVPSRFSG | | | 10.1101/ |
| | ISRDNSKNTLYLQMNSLRVEDTAV | | SGSGTEFTLTISSLQPEDFATYY | | | 2021.04.16.440101 |
| | YHCVRETVDGMDVWGQGTTVTV | | CLQHNSYPYTFGQGTKLEIK | | | |
| | SS | | | | | |
| 394 | QHQLVQSGAEVKKPGASVKVSCK | 395 | DIVMTQTPLSSPVTLGQPASIS | SARS- | SARS- | Peter et al., 2021, |
| | VSGYTLVEVSVHWVRQAPGKGFE | | CRSSQSLVHSDGNTYLSWLQQ | CoV2 | CoV2 | BioRxiv, doi: |
| | WMGGFDPENAATIYAQKFQGRVT | | RPGQPPRLLIYKVSNRFSGVPD | | | 10.1101/ |
| | MTEDTSTDTAYMELSSLRYEDTAV | | RFSGSGAGTEFTLKISRVEAED | | | 2021.04.16.440101 |
| | YFCATAPAVAGPLYYYYYGMDV | | VGVYYCTQATQFPHTFGQGTK | | | |
| | WGQGTTVTVSS | | LEIK | | | |
| 396 | QVQLVQSGAEVKKPGASVKVSCK | 397 | DIVMTQTPLSSPVTLGQPASIS | SARS- | SARS- | Peter et al., 2021, |
| | VSGYTLTEVSVHWVRQAPGKGLE | | CRSSQSLVHSDGNTYLSWLQQ | CoV2 | CoV2 | BioRxiv, doi: |
| | WMGGFDPEDAETIYAQKFQGRVT | | RPGQPPRLLIYKVSNRFSGVPD | | | 10.1101/ |
| | MTEDTSTDTAYMELSSLRYEDTAV | | RFSGSGAGTEFTLKISRVEAED | | | 2021.04.16.440101 |
| | YFCATAPAVAGPFYYYYYGMDV | | VGVYYCTQATQFPHTFGQGTK | | | |
| | WGQGTTVTVSS | | LEIK | | | |
| 398 | QVQVVESGGGVVQPGRSLRLSCA | 399 | NIQMTQSPSAMSASVGDSVTIT | SARS- | SARS- | Peter et al., 2021, |
| | ASGFTFSSYGMHWVRQAPGKGLE | | CRARQDINNYLAWFQQKPGK | CoV2 | CoV2 | BioRxiv, doi: |
| | WVAVIWYDGSNKYYADSVKGRFT | | VPKHLIYAASSLLSGVPSRFSG | | | 10.1101/ |
| | ISRDNSKNTLYLQMNSLRVEDTAV | | SGSGTEFTLTISSLQPEDFATYY | | | 2021.04.16.440101 |
| | YYCVRETVDGMDVWGQGTTVTV | | CLQHNSYPYTFGQGTKLEIK | | | |
| | SS | | | | | |
| 400 | QVQVVESGGGVVQPGRSLRLSCA | 401 | NIQMTQSPSAMSASVGDSVTIT | SARS- | SARS- | Peter et al., 2021, |
| | ASGFTFSSYGMHWVRQAPGKGLE | | CRARQDINNYLAWFQQKPGK | CoV2 | CoV2 | BioRxiv, doi: |
| | WVAVIWYDGSNKYYADSVKGRFT | | VPKHLIYAASSLLSGVPSRFSG | | | 10.1101/ |
| | ISRDNSKNTLYLQMNSLRVEDTAV | | SGSGTEFTLTISSLQPEDFATYY | | | 2021.04.16.440101 |
| | YYCVRETVDGMDVWGQGTTVTV | | CLQHNSYPYTFGQGTKLEIK | | | |
| | SS | | | | | |
| 402 | QVQLVQSGAEVKKPGASVKVSCK | 403 | DIVMTQTPLSSPVTLGQPASIS | SARS- | SARS- | Peter et al., 2021, |
| | VSGYTLTEVSVHWVRQAPGKGLE | | CRSSQSLVHSDGNTYLSWLQQ | CoV2 | CoV2 | BioRxiv, doi: |
| | WMGGFDPEDAETIYAQKFQGRVT | | RPGQPPRLLIYKVSNRFSGVPD | | | 10.1101/ |
| | MTEDTSTDTAYMELSSLRSEDTAV | | RFSGSGAGTDFTLKISRVEAED | | | 2021.04.16.440101 |
| | YFCATAPAVAGPFYNFYYGIDVW | | VGVYYCTQATQFPHTFGQGTK | | | |
| | GQGTTVTVSS | | LEIK | | | |
| 404 | QVQLVQSGAEVKKPGASVKVSCK | 405 | SYELTQPPSVSVSPGQTARITC | SARS- | SARS- | Wang et al., 2021, |
| | ASGYTFTSYGISWVRQAPGQGLE | | SGDALPKQYAYWYQQKPGQA | CoV2 | CoV2 | Science Translational |
| | WMGWISAYNGNTNYAQKLQGRV | | PVLVIYKDSERPSGIPERFSGSS | | (weak) | Medicine, |
| | TMTTDTSTSTAYMELRSLRSDDTA | | SGTTVTLTISGVQAEDEADYY | | | 13(577): eabf1555 |
| | VYYCARVPASYGDDDYYYYYGM | | CQSADSSGTLWVFGGGTKLTV | | | |
| | DVWGQGTTVTVSS | | L | | | |
| 406 | EVQLLESGGGLVQPGGSLRLSCAA | 407 | QTVVTQEPSLTVSPGGTVTLTC | SARS- | SARS- | Wang et al., 2021, |
| | SGFTFSNYAMSWVRQAPGKGLEW | | GSSTGAVTSGHYPYWFQQKSG | CoV2 | CoV2 | Science Translational |
| | VSGISNSGGSTYYEDSVKGRFTISR | | QAPRTLIYETNIKHSWTPARFS | | | Medicine, |
| | DNSKNTLYLQMNSLRAEDTAVYY | | GSLLGGKAALTLSGAQPDDEA | | | 13(577): eabf1555 |
| | CAKVGEYCGDDCYRGLDYWGQG | | DYYCLLSYSGARPVFGGGTKL | | | |
| | TLVTVSS | | TVL | | | |
| 408 | EVQLVESGGGLVQPGGSQRLSCAA | 409 | EIVMTQSPATLSVSPGERATLS | SARS- | SARS- | Wang et al., 2021, |
| | SGFTVSSNYMSWIRQAPGKGLEW | | CRASQSVSSHLAWYQQKPGQ | CoV2 | CoV2 | Science Translational |
| | VSVIYSGGSAYYVDSVKGRFTISR | | APRLLIYGASTRATGIPTRFSGS | | (weak) | Medicine, |
| | DNSKNTLYLQMNSLRPEDTAVYY | | GSGTEFTLTISSLQSEDFAVYY | | | 13(577): eabf1555 |
| | CARIANYMDVWGKGTTVTVSS | | CQQYNNWPPLTFGGGTKVEIK | | | |
| 410 | QVQLVESGGGLIQPGGSLRLSCAA | 411 | EIVLTQSPGTLSLSPGERATLSC | SARS- | SARS- | Wang et al., 2021, |
| | SGLTVSSNYMTWVRQAPGKGLEW | | RASQSVSSNYLAWYQQKPGQ | CoV2 | CoV2 | Science Translational |
| | VSVIYSGGSTFYADSVKGRFTISRD | | APRLLIYGASSRATGIPDRFSGS | | | Medicine, |
| | NSKNTLYLQMNSLRAEDTAVYYC | | GSGTDFTLTISRLEPEDFAVYY | | | 13(577): eabf1555 |
| | ARETYGMDVWGQGTTVTVSS | | CQQYGSSPWTFGQGTKVEIK | | | |
| 412 | QLQLQESGPGLVKPSETLSLTCTVS | 413 | QSALTQPASVSGSPGQSITISCT | SARS- | SARS- | Wang et al., 2021, |
| | GGSISRSDYYWGWIRQPPGKGLE | | GTSSDVGSYNLVSWYQQHPG | CoV2 | CoV2 | Science Translational |
| | WIGTIYYSGSTYYNPSLKSRVTISV | | KAPKLMIYEGSKRPSGVSSRFS | | | Medicine, |
| | DTSKNQFSLKLGSVTAADTAVYY | | GSKSGNTASLTISGLQGEDEAD | | | 13(577): eabf1555 |
| | CARQARTDASTYGHNFDSWGQGT | | YYCCSYAGSSTWVFAGGTKLT | | | |
| | LVT | | VL | | | |
| 414 | QLQLQESGPGLVKPSETLSLTCTVS | 415 | QSALTQPASVSGSPGQSITISCT | SARS- | SARS- | Wang et al., 2021, |
| | GGSISRSDFYWGWIRQPPGKGLEW | | GTSSDVGSYNLVSWYQQHPG | CoV2 | CoV2 | Science Translational |
| | IGTIYYSGSTYYNPSLKSRVTISVDT | | KAPKLMIYEGSKRPSGVSSRFS | | | Medicine, |
| | SKNQFSLKLDSVTAADTAVYYCA | | GSKFGNTASLTIYGLQGEDEA | | | 13(577): eabf1555 |
| | RQARTDGSTYGHNFDYWGQGTLV | | DYYCCSYAGSITWVFGGGTKL | | | |
| | TVSS | | TVL | | | |
| 416 | QVQLVQSGAEVKKPGASVKVSCK | 417 | QSVLTQPASVSGSPGQSITISCT | SARS- | SARS- | Wang et al., 2021, |
| | ASGYTFTGYYMHWVRQAPGQGLE | | GTSSDVGGYNYVSWYQQHPG | CoV2 | CoV2 | Science Translational |
| | WMGWINPNSGGTNYAQKFQGWV | | KAPKLMIYDVSNRPSGVSNRF | | | Medicine, |
| | TMTRDTSISTAYMELSRLRSDDTA | | SGSKSGNTASLTISGLQAEDEA | | | 13(577): eabf1555 |
| | VYYCARESHGGVWSAPGYYYGM | | DYYCSSYTNSSAVVFGGGTKL | | | |
| | DVWGQGT | | TVL | | | |
| 418 | EVQLVESGGGLVKPGGSLRLSCAA | 419 | EIVLTQSPGTLSLSPGERATLSC | SARS- | SARS- | Wang et al., 2021, |
| | SGFTFSSYSMNWVRQAPGKGLEW | | RASQSVSSSYLAWYQQKPGQ | CoV2 | CoV2 | Science Translational |
| | VSSISRDSKYIYYAESVKGRFTISR | | APRLLIYGASRRATGIPDRFSG | | | Medicine, |
| | DNAKNSLYLQMNSLIVEDTAVYY | | SGSGTDFTLTISRLEPEDFAVY | | | 13(577): eabf1555 |
| | CARDDGIAAASDYWGQGTLVTVSS | | YCQQYGSSPLLTFGGGTKVEIK | | | |
| 420 | QVQLQQWGAGLLKPSETLSRTCA | 421 | QSALTQPASVSGSPGQSITISCT | SARS- | SARS- | Wang et al., 2021, |
| | VYGGSFSGYYWSWIRQSPGKGLE | | GTSSDVGDYNYVSWYQQHPG | CoV2 | CoV2 | Science Translational |
| | WIGEINDSGSTNYNPSLKSRVTISV | | KAPKLMIYDVSNRPSGVSNRF | | | Medicine, |
| | DTSKNQFSLRLSSVTAADTAVYYC | | SGSKSGNTASLTISGLQAEDEA | | | 13(577): eabf1555 |
| | ARGHTQEKWELREGYYFDYWDQ | | DYYCSSYASGSTLYYVFGTGT | | | |
| | GTLVTVSS | | KVTVL | | | |
| 422 | EVQLLESGGGLVKPGGSLRLSCAA | 423 | NFMLTQPHSVSESPGKTVTISC | SARS- | SARS- | Wang et al., 2021, |
| | SGFTFSSYNMNWVRQAPGKGLEW | | TGSSGSIASNYVQWYQQRPGS | CoV2 | CoV2 | Science Translational |
| | VSSISSSSSHIYYADSVKGRFTISRD | | APTTVIYEDNQRPSGVPDRFSG | | (weak) | Medicine, |
| | NAKNSLYLQMNSLRAEDTAVYYC | | SIDSSSNSASLTISGLKTEDEAD | | | 13(577): eabf1555 |
| | ARERGYHGGKTSPFLGGQGTLVT | | YYCQSYDSSNYWVFGGGTKL | | | |
| | VSS | | TVL | | | |
| 424 | QVQLVESGAEVKKPGASVKVSCK | 425 | EIVLTQSPATLSLSPGERATLSC | SARS- | SARS- | Wang et al., 2021, |
| | ASGYTFTAYYMHWVRQAPGQGLE | | RASQSVSSYLAWYQQKPGQA | CoV2 | CoV2 | Science Translational |
| | WMGWINPNSGGTNYAQKFQGRV | | PRLLIYDASNRATGIPARFSGS | | | Medicine, |
| | TMTRDTSISTAYMELSRLRSDDTA | | GPGTDFTLTISSLEPEDFAVYY | | | 13(577): eabf1555 |
| | VYYCARPPRDYYDSSGYQIRDDHF | | CQQRSNCLFTFGPGTKVDIK | | | |
| | DYWGQGTLVTVSS | | | | | |
| 426 | EVQLVQSGAEVKKPGASVRVSCK | 427 | QSALTQPASVSGSPGQSITISCT | SARS- | SARS- | Wang et al., 2021, |
| | ASGYTFTSYDINWVRQATGQGLE | | GTSSDVGSYNLVSWYQQHPG | CoV2 | CoV2 | Science Translational |
| | WMGWMNPNSGNTGYAQKFQGRV | | KAPKLMIYEVSKRPSGVSNRFS | | | Medicine, |
| | TMTRNTSISTVYMELSSLRSEDTA | | GSKSGNTASLTISGLQAEDEAD | | | 13(577): eabf1555 |
| | VYYCARFPKVPAAIFPGDYYYGM | | YYCCSYAGSSTLVFGGGTKLT | | | |
| | DVWGQGTTVTVSS | | VL | | | |
| 428 | QVQLVESGGGVVQPGRSLRLSCA | 429 | DIQMTQSPSSLSASVGDRVTIS | SARS- | SARS- | Wang et al., 2021, |
| | ASGFTFSSYAMHWVRQAPGKGLE | | PKLLIYAASSLQSGVPSRFSGS | CoV2 | CoV2 | Science Translational |
| | CRASQSISSYLNWFQQKPGKA | | GSGTDFTLTISTLQPEDFATYY | | | Medicine, |
| | WVAVIWYDGSNKHYADSVKGRFT | | CQQSYGTPPWTFGQGTKVEIK | | | 13(577): eabf1555 |
| | ISRDNSKNTLYLQMNSLRAEDTAM | | | | | |
| | YYCARDEGSLTTTFDYWGQGTLV | | | | | |
| | TVSS | | | | | |
| 430 | EVQLVESGGGLVQPGGSLRLSCAA | 431 | QSALTQPPSVSGAPGQRVTISC | SARS- | SARS- | Wang et al., 2021, |
| | SGFTFSTYDMSWARQAPGKGLEW | | TGSSSNIGAGYDVHWYQQLPG | CoV2 | CoV2 | Science Translational |
| | VANIKQDGSEKYYVDSVKGRFTIS | | TAPKLLIYGNSNRPSGVPDRFS | | | Medicine, |
| | RDNAKNSLYLQMNSLRAEDTAVY | | GSKSGTSASLAITGLQAEDEAD | | | 13(577): eabf1555 |
| | YCARDTIPFWSGYYTSPDYYFDY | | YYCQSYDSSLSGVVFGGGTKL | | | |
| | WGQGTLVTVSS | | TVL | | | |
| 432 | QVQLQESGPGLVKPSQTLSLTCTV | 433 | QSALTQPPSASGSPGQSVTISC | SARS- | SARS- | Wang et al., 2021, |
| | SGGSISSGGYYWSWIRQHPGKGLE | | TGTSSDVGGYNYVSWYQQHP | CoV2 | CoV2 | Science Translational |
| | WIGYIYYSGTTYYNPSLKSRVTISV | | GKAPKLMIYEVSKRPSGVPDR | | | Medicine, |
| | DTSKNQFSLKLSSVTAADTAVYYC | | FSGSKSGNTASLTVSGLQAED | | | 13(577): eabf1555 |
| | ASSRYDFWSGSFDYWGQGTLVTV | | EADYYCSSYAGSNNWVFGGG | | | |
| | SS | | TKLTVL | | | |
| 434 | QVQLVQSGAEVKKPGASVKVSCK | 435 | QSALTQPASVSGSPGQSITISCT | SARS- | SARS- | Wang et al., 2021, |
| | TSGYIFTDYSMHWVRQAPGQGLE | | GTSSDVGGYNFVSWYQQHPG | CoV2 | CoV2 | Science Translational |
| | WMGWVNPNSGGTNYAQKFQGW | | KAPKLMIYEVSDRPSGVSNRFS | | | Medicine, |
| | VTMARDTSITTVYMELSRLRSDDT | | GSKSGNTASLTISGLQAEDEAD | | | 13(577): eabf1555 |
| | AVYYCARGPLPHRLVYDFWSGFH | | YYCSSYTSSSTWVFGGGTKLT | | | |
| | DAFDIWGQGTMVTVSS | | VL | | | |
| 436 | QVQLVESGGGVVQPGRSLRLSCA | 437 | DIQMTQSPSTLSASVGDRVTIT | SARS- | SARS- | Wang et al., 2021, |
| | ASGFTFSNYGMHWVRQAPGKGLE | | CRASQSISSWLAWYQQKPGKA | CoV2 | CoV2 | Science Translational |
| | WVAVIRYNGNNIYYADFVKGRFTI | | PKLLIYEASSLKSGVPSRFSGS | | (weak) | Medicine, |
| | SRDNSKNTLYLQMNSLRGEDTAV | | GSGTEFTLTISSLQPDDFATYY | | | 13(577): eabf1555 |
| | YYCAREGDGPDAFDIWGQGTMV | | CQQYNNYGITFGQGTRLEIK | | | |
| 438 | EVQLVESGGGLIQPGGSLRLSCAA | 439 | DIQLTQSPSFLSASVGDRVTITC | SARS- | SARS- | Wang et al., 2021, |
| | SGLTVSSNYMSWVRQAPGKGLEW | | RASQGVGSYLAWYQQKPGKA | CoV2 | CoV2 | Science Translational |
| | VSVIYSGGSTYYADSVRGRFTISRD | | PNLLIYAASTLQSGVPSRFSGS | | | Medicine, |
| | NSENTLYLQMNSLRAEDTAVYYC | | GSGTEFTLKITSLQPEDIATYY | | | 13(577): eabf1555 |
| | ARVGDWYFSWGQGTLVTVSS | | CQQLNSYPPLTFGGGTKVEIK | | | |
| 440 | QVQLQESGPGLVKPSETLSLTCTFS | 441 | EIVLTQSPGTLSLSPGERVTLSC | SARS- | SARS- | Wang et al., 2021, |
| | GGSISSYSWNWIRQPPGKGLEWIG | | RASQSITSTYLTWYQQKPGQA | CoV2 | CoV2 | Science Translational |
| | YIYTSGSTNYNPSLKSRVTMSVDT | | PRLLIYGASNRATGIPDRFSSSG | | (weak) | Medicine, |
| | SKNQFSLKLNSVTAADAAVYFCA | | SGTDFTLTISRLEPEDFAVYYC | | | 13(577): eabf1555 |
| | RGLFYNSGGYYSSNYYYYIDVWG | | QHYDRSPLCSFGQGTKLEIK | | | |
| | KGTTVTVSS | | | | | |
| 442 | EVQLVQSAAEVKKPGESLRISCKG | 443 | EIVLTQSPGILSLSPGERATLSC | SARS- | SARS- | Wang et al., 2021, |
| | SGYSFTNYWINWVRQMPGKGLEW | | RASQSVSSSYLAWYQQKPGQ | CoV2 | CoV2 | Science Translational |
| | MGRIDPSDSYTNYSPSFQGHVTISA | | APRLLIYGASSRAAGIPDRFSG | | | Medicine, |
| | DKSISTAYLQWSSLKASDTAMYYC | | SGSGTDFTLTISRLEPEDSAVY | | | 13(577): eabf1555 |
| | ARLNTDLRSRFGELYYYFDYWGQ | | YCQQYGSSLTWTFGQGTKVEI | | | |
| | GTLV | | K | | | |
| 444 | QVQLVQSGAEVKKPGASVKVSCK | 445 | DIQMTQSPSSLSASVGDRVTIT | SARS- | SARS- | Wang et al., 2021, |
| | ASGYTFTTYYLHWVRQAPGQGLE | | CQASQDITNHLNWYQQKPGK | CoV2 | CoV2 | Science Translational |
| | WMGIIDPSGGSTSYAQKFQGRVTM | | APKLLIYYASNLETGVPSRFSG | | | Medicine, |
| | TKDTSTSTVYMELSSLRSEDTAVY | | IGSGTDFTFTISSLQPEDIATYY | | | 13(577): eabf1555 |
| | YCARVGRGFSYGYFDYWGQGAL | | CQQYDNLPPLTFGGGTKVEIK | | | |
| | VTVSS | | | | | |
| 446 | QVQLVQSGAEVKKPGSSVKVSCK | 447 | DIVMTQSPLSLPVTPGEPASISC | SARS- | SARS- | Wang et al., 2021, |
| | ASGGTFNSYAISWVRQAPGQGLE | | RSSQSLLHSNGYNYLDWYLQ | CoV2 | CoV2 | Science Translational |
| | WMGGIIPIFGTANYAQKFQGRVTIT | | KPGQSPQLLIYLGSNRASGVPD | | (weak) | Medicine, |
| | ADESTSTAYMELSSLRSEDTAVYY | | RFSGSGSGTDFTLKISRVEAED | | | 13(577): eabf1555 |
| | CARVGAEWPRDHKYYYYGMDV | | VGVYYCMQALQTPLTFGGGT | | | |
| | WGQGTTVTVSS | | KVEIK | | | |
| 448 | QVQLVESGGGLVQPGGSLRLSCAA | 449 | DIQMTQSPSSLSASVGDRVTIT | SARS- | SARS- | Wang et al., 2021, |
| | SGFTFSNYDMHWVRQATGRGLEW | | CRASQSISSYLNWYQQKPGKA | CoV2 | CoV2 | Science Translational |
| | VSTIGTAGDTYYPGSVKGRFTISRE | | PKLLIYAASSLQSGVPSRFSGS | | (weak) | Medicine, |
| | NAKNSLYLQMNSLRAGDTAVYYC | | GSGTDFTLTISSLQPEDFATYY | | | 13(577): eabf1555 |
| | ARVKYGGYVGYFDYWGQGTLVT | | CQQSYSTPELTFGGGTKVEIK | | | |
| | VSS | | | | | |
| 450 | EVQLVESGGGLVQPGGSLRLSCAA | 451 | DIQMTQSPSSLSASVGDRVTIT | SARS- | SARS- | Wang et al., 2021, |
| | SGFTVSSNYMSWVRQAPGKGLEW | | CQASQDISNYLNWYQQKPGK | CoV2 | CoV2 | Science Translational |
| | VSLIYSGGTTYYADSVKGRFTISRD | | APKLLIYDASNLETGVPSRFSG | | | Medicine, |
| | NSKNTLYLQMNSLRAEDTAVYYC | | SGSGTDFTFTISSLQPEDIATYY | | | 13(577): eabf1555 |
| | ARETLGRGGDYWGQGTLVTVSS | | CQQYDNLPRSFGQGTKLEIK | | | |
| 452 | EVQLVESGGGLVQPGRSLRLSCAA | 453 | QSVLTQPPSASGTPGQRVTISC | SARS- | SARS- | Wang et al., 2021, |
| | SGFTFDDYAMHWVRQAPGKGLE | | SGSSSNIGSNTVNWYQQLPGT | CoV2 | CoV2 | Science Translational |
| | WVSGVSWNSGTIGYADSVKGRFTI | | APKLLIYSNNQRPSGVPDRFSG | | | Medicine, |
| | SRDNAKNSLYLQMNSLRAEDTAL | | SKSGTSASLAISGLQSEDEADY | | | 13(577): eabf1555 |
| | YYCAKIADIVRAYDFWSGQHFDAF | | YCAAWDDSLVVFGGGTKLTV | | | |
| | DIWGQGTMVT | | L | | | |
| 454 | EVQLVESGGGLVQPGRSLRLSCAA | 455 | DIQMTQSPSTLSASVGDRVTIT | SARS- | SARS- | Wang et al., 2021, |
| | SGFTFDDYAMHWVRQAPGKGLE | | CRASQSISSWLAWYQQKPGKA | CoV2 | CoV2 | Science Translational |
| | WVSIISWNSDNIGYADSVKGRFTIS | | PNLLIYTASNLESGVPSRYSGS | | | Medicine, |
| | RDNARNSLYLQMNSLRVEDTALY | | GSGTEFTLSISSLQPEDSATYFC | | | 13(577): eabf1555 |
| | YCAKDKGSGSGYGMDVWGRGTT | | QRYNSYPYSFGQGTKLEIK | | | |
| | VTVSS | | | | | |
| 456 | QLQLQESGPGLVKPSETLSLTCTVS | 457 | DIQMTQSPSSLSASVGDRVTIT | SARS- | SARS- | Wang et al., 2021, |
| | GGSISSSYYYWGWIRQPPGKGLEW | | CQASQDISNYLNWYQQKPGK | CoV2 | CoV2 | Science Translational |
| | IGSIYYSGSTYYNPSLKSRVTISVDT | | APKLLIYDASNLETGVPSRFSG | | (weak) | Medicine, |
| | SKNQFSLTLSSVTAADTAVYYCAT | | SGSGTDFTFTISSLQPEDIATYY | | | 13(577): eabf1555 |
| | GGRFWGWFDPWGQGTLVTVSS | | CQQYDNLPPKLTFGGGTKVEIK | | | |
| 458 | EVQLVQSGAEVKKPGESLKISCKG | 459 | QSVLTQPPSASGTPGQRVTISC | SARS- | SARS- | Wang et al., 2021, |
| | SGYSFISYWIGWVRQMPGKGLEW | | SGSSSNIGSNTVNWYQQLPGT | CoV2 | CoV2 | Science Translational |
| | MGIIYPGDSDTRYSPSFQGQVTISA | | APKLLIYSNNQRPSGVPDRFSG | | | Medicine, |
| | DKSINTAYLQWSSLKASDTAMYY | | SKSGTSASLAISGLQSEDEADY | | | 13(577): eabf1555 |
| | CARRVTIPNGWFDPWGQGTLVTV | | YCAAWDDSLNGVVFGGGTKL | | | |
| | SS | | TVL | | | |
| 460 | QVQLVQSGAEVKKPGSSVKVSCK | 461 | DIQMTQSPSSVSASVGDRVTIT | SARS- | SARS- | Wang et al., 2021, |
| | ASGGTFSSYAINWVRQAPGQGLE | | CRASQGISRWLAWYQQKPGK | CoV2 | CoV2 | Science Translational |
| | WMGGIIPIFGTANYAQKFQGRVTIT | | APKLLIYAAFSLQSGVPSRFSG | | | Medicine, |
| | ADESTSTAYMELSSLRSEDTALYY | | SGSGTDFTLTISSLQPEDFATY | | | 13(577): eabf1555 |
| | CARNRAVSEREDYYYGMDVWGQ | | YCQQANSFPLTFGGGTKVEIK | | | |
| | GTTVTVSS | | | | | |
| 462 | QVQLVQSGAEVKKPGASVKVSCK | 463 | QSVLTQPASVSGSPGQSITISCT | SARS- | SARS- | Wang et al., 2021, |
| | ASGYIFTDYSMITWVRQAPGQGLE | | GTSSDVGGYKFVSWYQQHPG | CoV2 | CoV2 | Science Translational |
| | WIGWVNPNSGGTNYAQKFQGWV | | KAPKLMIYEVSNRPSGVSNRFS | | | Medicine, |
| | TMARDTSITTVYMELSRLKSDDTA | | GSKSGNTASLTISGLQAEDEAD | | | 13(577): eabf1555 |
| | VYFCARGPLFHRLVYDFWSGYHD | | YYCNSYTSSSTWVFGGGTKLT | | | |
| | GFDMWGQGTMVTVSS | | VL | | | |
| 464 | EVQLVESGGGLIQPGGSLRLSCAA | 465 | EIVLTQSPGTLSLSPGERATLSC | SARS- | SARS- | Wang et al., 2021, |
| | SGLTVSRNYMNWVRQAPGKGLE | | RASQSFSSTYLAWYQQKPGQA | CoV2 | CoV2 | Science Translational |
| | WVSVMYSGGSTFYADSVKGRFTIS | | PRLLIYGASSRATGIPDRFSGSG | | | Medicine, |
| | RDNSKNTLYLQMNSLRAEDTAVY | | SGTDFTLTISRLEPEDFAVYYC | | | 13(577): eabf1555 |
| | YCARESYGMDVWGQGTTVTVSS | | QQYVTSPWTFGQGTKVEIK | | | |
| 466 | QVQLQQWGAGLLKPSETLSRTCA | 467 | QSALTQPASVSGSPGQSITISCT | SARS- | SARS- | Wang et al., 2021, |
| | VYGGSFSGYYWSWIRQSPGKGLE | | GTSSDVGDYNYVSWYQQHPG | CoV2 | CoV2 | Science Translational |
| | WIGEINDSGSTNYNPSLKSRVTISV | | KAPKLMIYDVSNRPSGVSNRF | | | Medicine, |
| | DTSKNQFSLRLSSVTAADTAVYYC | | SGSKSGNTASLTISGLQAEDEA | | | 13(577): eabf1555 |
| | ARGHTQEKWELREGYYFDYWDQ | | DYYCSSYASGSTLYYVFGTGT | | | |
| | GTLVTVSS | | KVTVL | | | |
| 468 | QVQLVESGGGVVQPGRSLRLSCA | 469 | DIQMTQSPSSLSASVGDRVTIT | SARS- | SARS- | Wang et al., 2021, |
| | ASGFPFSIYGMHWVRQAPGKGLE | | CRASQSISSYLNWYQQKPGKA | CoV2 | CoV2 | Science Translational |
| | WVAVISYDGGNKYYADSVKGRFT | | PKLLIYAASSLQSGVPSRFSGS | | | Medicine, |
| | ISRDNSKNTLYLQMNSLRAEDTAV | | VSGTDFTLTISSLLPEDFATYY | | | 13(577): eabf1555 |
| | YYCAKEGRPSDIVVVVAFDYWGQ | | CQQSYSTPRTFGQGTKVEIK | | | |
| | GTLVTVSS | | | | | |
| 470 | QVQLVQSGPEVKKPGTSVKVSCK | 471 | EIVLTQSPGTLSLSPGERATLSC | SARS- | SARS- | Wang et al., 2021, |
| | ASGFTFTSSAVQWVRQARGQRLE | | RASQSVSSSYLAWYQQKPGQ | CoV2 | CoV2 | Science Translational |
| | WIGWIVVGSGNTNYAQKFQERVTI | | APRLLIYGASSRATGIPDRFSGS | | | Medicine, |
| | TRDMSTSTAYMELSSLRSEDTAVY | | GSGTDFTLTISRLEPEDFAVYY | | | 13(577): eabf1555 |
| | YCAAPHCSGGSCYDAFDIWGQGT | | CQQYGSSPWTFGQGTKVEIK | | | |
| | MVTVSS | | | | | |
| 472 | QVQLVQSGPEVKKPGTSVKVSCK | 473 | EIVLTQSPGTLSLSPGERATLSC | SARS- | SARS- | Wang et al., 2021, |
| | ASGFTFTSSAVQWVRQARGQRLE | | RASQSVSSSYLAWYQQKPGQ | CoV2 | CoV2 | Science Translational |
| | WIGWIVVGSGNTNYAQKFQERVTI | | APRLLIYGASSRATGIPDRFSGS | | (weak) | Medicine, |
| | TRDMSTSTAYMELSSLRSEDTAVY | | GSGTDFTLTISRLEPEDFAVYY | | | 13(577): eabf1555 |
| | YCAAPHCSGGSCYDAFDIWGQGT | | CQQYGSSPWTFGQGTKVEIK | | | |
| | MVTVSS | | | | | |
| 474 | EVQLVESGGGLIQPGGSLRLSCAA | 475 | QSALTQPASVSGSPGQSITISCT | SARS- | SARS- | Wang et al., 2021, |
| | SGFTVSSNYMSWVRQAPGKGLEW | | GTSSDVGGYNYVSWYQQHPG | CoV2 | CoV2 | Science Translational |
| | VSVIYSGGSTYYADSVKGRFTISRD | | KAPKLMIYDVSNRPSGVSNRF | | | Medicine, |
| | NSKNTLYLQMNSLRAEDTAVYYC | | SGSKSGNTASLTISGLQAEDEA | | | 13(577): eabf1555 |
| | AREGDVEGYYDFWSGYSRDRYYF | | DYYCSSYTSSSTRVFGTGTKV | | | |
| | DYWGQGTLVTVSS | | TVL | | | |
| 476 | QVQLVQSGAEVKKPGASVKVSCK | 477 | QSALTQPPSASGSPGQSVTISC | SARS- | SARS- | Wang et al., 2021, |
| | ASGYTFTGYYMHWVRQAPGQGLE | | TGTSSDVGGYNYVSWYQQRP | CoV2 | CoV2 | Science Translational |
| | WMGWINPNSGGTNYAQKFQGRV | | GKAPKLMIDEVTKRPSGVPDR | | | Medicine, |
| | TMTRETSISTVYMELSRLRSDDTA | | FSGSKSGNTASLTVSGLQAED | | | 13(577): eabf1555 |
| | VYYCARDLGWSRLHGAFDIWGQG | | EADYYCSSYAGSNNWVFGGG | | | |
| | TMVTVSS | | TKLTVL | | | |
| 478 | QVQLQESGPGLVKPSGTLSLTCTV | 479 | QSVLTQPPSASGTPGQRVTISC | SARS- | SARS- | Wang et al., 2021, |
| | SSDSVSSYYWNWIRQTTGKGMEW | | SGISSNLGSNTVNWFQQLPGT | CoV2 | CoV2 | Science Translational |
| | IGRIDTGGRTNYNPSLSSRVAMSM | | APKLLIYNSNRRPSGVPDRFSG | | | Medicine, |
| | ATSKNQFSLKLSSVTAADTAVYFC | | SKSGTSASLAISGLQSEDEGDY | | | 13(577): eabf1555 |
| | ARGLSYYPLYGSHINYIDYWGQGT | | YCAEWDDSLSTWVFGGGTHL | | | |
| | LVTVSS | | TVL | | | |
| 480 | QVQLQESGPGLVKPSGTLSLTCTV | 481 | QSVLTQPPSASGTPGQRVTISC | SARS- | SARS- | Wang et al., 2021, |
| | SSDSVSSYYWNWIRQTTGKGMEW | | SGISSNLGSNTVNWFQQLPGT | CoV2 | CoV2 | Science Translational |
| | IGRIDTGGRTNYNPSLSSRVAMSM | | APKLLIYNSNRRPSGVPDRFSG | | | Medicine, |
| | ATSKNQFSLKLSSVTAADTAVYFC | | SKSGTSASLAISGLQSEDEGDY | | | 13(577): eabf1555 |
| | ARGLSYYPLYGSHINYIDYWGQGT | | YCAEWDDSLSTWVFGGGTHL | | | |
| | LVTVSS | | TVL | | | |
| 482 | QVQLQESGPGLVKPSGTLSLTCAV | 483 | EIVLTQSPATLSLSPGERATLSC | SARS- | SARS- | Wang et al., 2021, |
| | SGGSISSSNWWSWVRQPPGKGLE | | RASQSVSSYLAWYQQKPGQA | CoV2 | CoV2 | Science Translational |
| | WIGEIYHSGSTNYNPSLKSRVTISV | | PRLLIYDASNRATGIPARFSGS | | (weak) | Medicine, |
| | DKSKNQFSLKLSSVTAADTAVYYC | | GSGTDFSLTISSLEPEDFAVYY | | | 13(577): eabf1555 |
| | ATHLRLGELRGVDYWGQGTLVTV | | CQQRSNWPPWTFGQGTKVEIK | | | |
| | SS | | | | | |
| 484 | EVQLLESGGGLVKPGGSLRLSCAA | 485 | NFMLTQPHSVSESPGKTVTISC | SARS- | SARS- | Wang et al., 2021, |
| | SGFTFSSYSMNWVRQAPGKGLEW | | TGSSGSIASNYVQWYQQRPGS | CoV2 | CoV2 | Science Translational |
| | VSSISSSSSYIYYADSVKGRFTISRD | | APTTVIYEDNQRPSGVPDRFSG | | | Medicine, |
| | NAKNSLYLQMNSLRAEDTAVYYC | | SIDSSSNSASLTISGLKTEDEAD | | | 13(577): eabf1555 |
| | ARERGYYGGKTPPFLGGQGTLVT | | YYCQSYDSSNYWVFGGGTKL | | | |
| | VSS | | TVL | | | |
| 486 | QVQLVQSGAEVKKPGSSVKVSCK | 487 | EIVLTQSPATLSLSPGERATLSC | SARS- | SARS- | Wang et al., 2021, |
| | ASGGTFSSYAISWVRQAPGQGLEW | | RASQSVSSYLAWYQQKPGQA | CoV2 | CoV2 | Science Translational |
| | MGGIIPIFGTANYAQKFQGRVTITA | | PRLLIYDASNRATGIPARFSGS | | | Medicine, |
| | DESTSTAYMELSSLRSEDTAVYYC | | GSGTDFTLTISSLEPEDFAVYY | | | 13(577): eabf1555 |
| | ARGNRLLYCSSTSCYLDAVRQGY | | CQQRSNWPLTFGGGTKVEIK | | | |
| | YYYYYMDVWGKGTTVTVSS | | | | | |
| 488 | QVQLVQSGAEVKKPGASVKVSCK | 489 | QSALTQPASVSGSPGQSITISCT | SARS- | SARS- | Wang et al., 2021, |
| | ASGYTFTGYYMHWVRQAPGQGLE | | GTSSDVGGYNYVSWYQQHPG | CoV2 | CoV2 | Science Translational |
| | WMGWINPNSGGTNYAQKFQGRV | | KAPKLMIYDVSNRPSGVSNRF | | | Medicine, |
| | TMTRDTSIITAYMELSRLRSDDTA | | SGSKSGNTASLTISGLQAEDEA | | | 13(577): eabf1555 |
| | VYYCARAPPFYDFWSGIDYWGQG | | DYYCSSYTSSSTLVFGGGTKLT | | | |
| | TLVTVSS | | V | | | |
| 490 | QVQLVQSGAEVKKPGSSVKVSCK | 491 | DIQMTQSPSSLSASVGDRVTIT | SARS- | SARS- | Wang et al., 2021, |
| | ASGGTFSTYAISWVRQAPGQGLE | | CRASQSISSYLNWYQQKPGKA | CoV2 | CoV2 | Science Translational |
| | WMGGIIPIFGTANYAQKFQGRVTIT | | PKLLIYVASSLQSGVPSRFSGS | | (weak) | Medicine, |
| | ADESTSTAYMELSSLRSEDTAVYY | | GSGTDFTLTISSLQPEDFATYY | | | 13(577): eabf1555 |
| | CARDLRNCSSTSCYYWFDPWGQG | | CQQSYSTRTFGQGTKVEIK | | | |
| | TLVTVSS | | | | | |
| 492 | QVQLVQSGAEVKKPGSSVKVSCK | 493 | EIVLTQSPATLSLSPGERATLSC | SARS- | SARS- | Wang et al., 2021, |
| | ASGGTFSSYAISWVRQAPGQGLEW | | RASQSVSSYLAWYQQKPGQA | CoV2 | CoV2 | Science Translational |
| | MGGIIPIFGTANYAQKFQGRVTITA | | PRLLIYDASNRATGIPARFSGS | | | Medicine, |
| | DESTSTAYMELSSLRSEDTAVYYC | | GSGTDFTLTISSLEPEDFAVYY | | | 13(577): eabf1555 |
| | ARGNRLLYCSSTSCYLDAVRQGY | | CQQRSNWPLTFGGGTKVEIK | | | |
| | YYYYYMDVWGKGTTVTVSS | | | | | |
| 494 | QVQLVQSGAEVKKPGASVKVSCK | 495 | DIQMTQSPSSLSASVGDRVTIT | SARS- | SARS- | Wang et al., 2021, |
| | ASGYTFTGYYMHWVRQAPGQGLE | | CQASQDISNYLNWYQQKPGK | CoV2 | CoV2 | Science Translational |
| | WMGWINPISGGTNYAQKFQGRVT | | APKLLIYDASNLETGVPSRFSG | | | Medicine, |
| | MTRDTSISTAYMELSRLRSDDTAV | | SGSGTDFTFTISSLQPEDIATYY | | | 13(577): eabf1555 |
| | YYCASPASRGYSGYDHGYYYYMD | | CQQYDNLPITFGQGTRLEIK | | | |
| | VWGKGTTVTVSS | | | | | |
| 496 | QVQLVQSGAEVKKPGASVKVSCK | 497 | QSALTQPASVSGSPGQSITISCT | SARS- | SARS- | Wang et al., 2021, |
| | ASGYTFTGYFMHWVRQAPGQGLE | | GTSSDVGGYNYVSWYQQHPG | CoV2 | CoV2 | Science Translational |
| | WMGWINPNSGGTNYAQKFQGRV | | KAPKVMIYDVSNRPSGVSNRF | | (weak) | Medicine, |
| | TMTRDTSITTAYMELSRLRSDDTA | | SGSKSGNTASLTISGLQAEDEA | | | 13(577): eabf1555 |
| | VYYCARDDTLLRYSDWLPTTSFG | | DYYCSSYTSSSTNVFGTGTKV | | | |
| | GMDVWGQGTTVTVSS | | TVL | | | |
| 498 | QVQLVESGGGVVQPGRSLRLSCA | 499 | QSALTQPRSVSGSPGQSVTISC | SARS- | SARS- | Wang et al., 2021, |
| | ASGFTFSSYGMHWVRQAPGKGLE | | TGTSSDVGGYNYVSWYQQHP | CoV2 | CoV2 | Science Translational |
| | WVAVIRYDGSNKYYADSVKGRFT | | GKAPKLMIYDVSKRPSGVPDR | | | Medicine, |
| | ISRDNSKNKLYLQMNSLRAEDTAV | | FSGSKSGNTASLTISGLQAEDE | | | 13(577): eabf1555 |
| | YYCAREDYYDSSGSLDYWGQGTL | | ADYYCCSYAGSPWVFGGGTK | | | |
| | VTVSS1 | | LTVL | | | |
| 500 | QVQLVQSGPEVKKPGTSVKVSCK | 501 | EIVLTQSPGTLSLSPGERATLSC | SARS- | SARS- | Wang et al., 2021, |
| | ASGFTFTSSAVQWVRQARGQRLE | | RASQSVSSSYLAWYQQKPGQ | CoV2 | CoV2 | Science Translational |
| | WIGWIVVGSGNTNYAQKFQERVTI | | APRLLIYGASSRATGIPDRFSGS | | | Medicine, |
| | TRDMSTSTAYMELSSLRSEDTAVY | | GSGTDFTLTISRLEPEDFAVYY | | | 13(577): eabf1555 |
| | YCAAPHCSGGSCYDAFDIWGQGT | | CQQYGSSPYTFGQGTKLEIK | | | |
| | MVTVSS | | | | | |
| 502 | QVQLVQSGAEVKKPGASVKVSCK | 503 | QSALTQPASVSGSPGQSITISCT | SARS- | SARS- | Wang et al., 2021, |
| | ASGYTFTGYFLHWVRQAPGQGLE | | GTSSDVGYYNFVSWYQQHPG | CoV2 | CoV2 | Science Translational |
| | WVGWISPISGGTNYALKFQGRVT | | KAPKLMIFDVSNRPSGVSNRFS | | | Medicine, |
| | MTRDTSSTTAYMDLSRLRSDDTA | | GSKSGNTASLTISGLQAEDEAD | | | 13(577): eabf1555 |
| | VYYCAREALGYGDFPHDGFDLWG | | YYCSSYTSSSARVFGGGTKVT | | | |
| | KGTMVTVSS | | VL | | | |
| 504 | QVQLVESGGGVVQPGRSLRLSCA | 505 | DIQMTQSPSSLSASVGDRVTIT | SARS- | SARS- | Wang et al., 2021, |
| | ASGFTFSSYTMHWVRQAPGKGLE | | CRASQGISNYLAWYQQKPGK | CoV2 | CoV2 | Science Translational |
| | WVAVISYDGSNKYYADSVKGRFTI | | VPKLLIYAASTLQSGVPSRFSG | | | Medicine, |
| | SRDNSKNTLYLQMNSLRAEDTAV | | SGSGTDFTLTISSLQPEDVATY | | | 13(577): eabf1555 |
| | YYCARGPRGYYDFWSGYENEYYF | | YCQKYNSAPLTFGQGTRLEIK | | | |
| | DYWGQGTLVTVSS | | | | | |
| 506 | QVQLVESGGGVVQPGRSLRLSCA | 507 | EIVLTQSPATLSLSPGERATLSC | SARS- | SARS- | Wang et al., 2021, |
| | ASGFTFSSYAMHWVRQAPGKGLE | | RASQSVSSYLAWYQQKPGQA | CoV2 | CoV2 | Science Translational |
| | WVAVISYDGSNKYYADSVKGRFTI | | PRLLIYDASNRATGIPARFSGS | | | Medicine, |
| | SRDNSKNTLYLQMNSLRAEDTAV | | GSGTDFTLTISSLEPEDFAVYY | | | 13(577): eabf1555 |
| | YYCAREGAGPYYYDSSGYYTLFD | | CQQRSNWPTFGQGTRLEIK | | | |
| | DWGQGTLVTVSS | | | | | |
| 508 | QVQLVQSGAEVKKPGSSVRVSCK | 509 | QLVLTQPASVSGSPGQSIIVSCT | SARS- | SARS- | Wang et al., 2021, |
| | ASGGTFSTYPISWVRQAPGQGLEW | | GTSSDVGGYKFVSWYQQHPG | CoV2 | CoV2 | Science Translational |
| | MGGIIPIFGTAKSAQKFQGRVTITA | | KAPRVMIYDVSNRPSGVSNRF | | | Medicine, |
| | DEFTSTAYMEMSSLRSEDTAMYY | | SGSKSGNTASLTISGLQADDEA | | | 13(577): eabf1555 |
| | CAREGRRYGSGWYISTGYFDYWG | | DYYCSSYTNSSTVVFGGGTKV | | | |
| | QGTLVTVSS | | TVL | | | |
| 510 | QVQLVQSGGGVVQPGRSLRLSCV | 511 | SYELTQPPSVSVSPGQTATITCS | MERS- | MERS- | Tang, X. et al., 2014, |
| | ASEFTFNTYGMHWVRQAPGKGLE | | GDELGDKFAFWYQQKPGQSP | CoV | CoV | PNAS, |
| | WVAAISYDGTKKFYADSLKGRFTI | | VLVIYQDSKRPSGIPERFSGSNS | | | 111(19): E2018-26 |
| | SRDNSKNTLYLQMNSLRSEDTAV | | GNTATLTISGTQALDEADYYC | | | |
| | YYCARSGDSDAFDIWGQGTMVTV | | QAWDSNSYVFGTGTKVTVL | | | |
| | SS | | | | | |
| 512 | EVQLVQSGAEVKEPGSSVKVSCKA | 513 | QPVLTQPPSASGTPGQRVTISC | MERS- | MERS- | Tang, X. et al., 2014, |
| | SGGTFGSYAINWVRQAPGQRLEW | | SGSSSNIGSNYVFWYQQLPGM | CoV | CoV | PNAS, |
| | MGWIDAANGNTKYSQKFQGRVTI | | APKLLISRNNQRPSGVPDRFSG | | | 111(19): E2018-26 |
| | TGDTSASTAYMELSSLRSEDTAVY | | SKSGTSASLAISGPQSEDEADY | | | |
| | YCARDRWMTTRAFDIWGQGTMV | | YCAAWDDSLRGPVFGGGTRV | | | |
| | TVSS | | TVL | | | |
| 514 | QVQLVQSGAEVKKPGSSVKVSCK | 515 | ETTLTQSPATLSVSPGERATLS | MERS- | MERS- | Tang, X. et al., 2014, |
| | ASGGTFSSYAVSWVRQAPGQLEW | | CRASESVGSNLAWYQQKPGQ | CoV | CoV | PNAS, |
| | VGRIIPIFGKANYAQKFQGRVTITA | | APSLLIYGASTRATGIPDRFSGS | | | 111(19): E2018-26 |
| | DKSTSTAYMELSSLRPEDTAVYYC | | GSGTDFTLTISSLQSEDFAAYY | | | |
| | ARDQGISANFKDAFDIWGQGTTVT | | CQQYNNWPLTFGPGTKVEIK | | | |
| | VSS | | | | | |
| 516 | QVQLVQSGAEVKKPGSSVKVSCK | 517 | ETTLTQSPGTLSLSPGERATLS | MERS- | MERS- | Tang, X. et al., 2014, |
| | ASGGTFSSYAISWVRQAPGQGLEW | | CRASQSVSSSIAWYQQKPGQA | CoV | CoV | PNAS, |
| | MGGIIPIFGTANYAQKFQGRVTITA | | PRLLMFDSSTRATGIPDRFSGS | | | 111(19): E2018-26 |
| | DKSTSTAYMELSSLRSEDTAVYYC | | GSGTDFTLNISSLEPEDFAVYY | | | |
| | ARVGYCSSTSCHIGAFDIWGQGTT | | CQQYSSSPYTFGQGTKLEIK | | | |
| | VTVSS | | | | | |
| 518 | QVQLVQSGAEVKKPGSSVKVSCK | 519 | DIQMTQSPDSLAVSLGERATIN | MERS- | MERS- | Tang, X. et al., 2014, |
| | ASGGTFSSYAISWVRQAPGQGLEW | | CKSSQSVLYSSNNKNYLAWY | CoV | CoV | PNAS, |
| | MGGIIPIFGTANYAQKFQGRVTITA | | QQKPGQPPKLLIYWASARESG | | | 111(19): E2018-26 |
| | DKSTSTAYMELSSLRSEDTAVYYC | | VPDRFSGSGSGTDFTLTISSLQP | | | |
| | ARASYCSTTSCASGAFDIWGQGTL | | EDVAIYYCQQYYSVPFTFGPG | | | |
| | VTVSS | | TKVEIK | | | |
| 520 | EVQLVQSGAEVKKPGASVKVSCK | 521 | QPGLTQPPSVSKGLRQTATLTC | MERS- | MERS- | Tang, X. et al., 2014, |
| | ASGYTFNVYAINWVRQAPGQGLE | | TGNSNNVGNQGAAWLQQHQ | CoV | CoV | PNAS, |
| | WMGRIIPILGIANYAQKFQGRVTIT | | GHPPKLLSYTNNNRPSGISERL | | | 111(19): E2018-26 |
| | ADKSTSTAYMELSSLRSEDTAVYY | | SASRSGNTASLAITGLQPEDEA | | | |
| | CARDYYGSGARGFDYWGQGTLVT | | DYYCASWDSSLSVWVIGGGT | | | |
| | VSS | | KLTVL | | | |
| 522 | DVKLVESGGGLVKPGGSLKLSCA | 523 | DIQMTQTTSSLSASLGDRVTIS | MERS- | MERS- | Li, Y. et al., 2015, |
| | ASGFTFSSYTMSWVRQTPEKRLEW | | CRASQDISNYLNWYQQKPDGT | CoV | CoV | Cell Research, |
| | VATISSGGSYTYYPDSVKGRFTISR | | VKLLIYYTSRLHSGVPSRFSGS | | | 25: 1237-1249 |
| | DNAKNTLYLQMSSLKSEDTAMYY | | GSGTDYSLTISNLEQEDIATYF | | | |
| | CTRDGNDYDYWGQGTTLTVSS | | CQQGNTLPRTFGGGTKLEIK | | | |
| 524 | QVQLVQSGAEVKKPGSSVKVSCK | 525 | QSALTQPPSASGTPGQRVTISC | MERS- | MERS- | Choi et al., |
| | ASGGTFRSHAISWVRQAPGQGLE | | SGSSSNIGSNTVNWYQQLPGT | CoV | CoV | WO2019/039891 |
| | WMGGIIPFASANYAQKFQGRVTIT | | APKLLIYSNNQRPSGVPDRFSG | | | |
| | ADESTSTAYMDLSSLRSDDTAVYY | | SKSGTSASLAISGLQSEDEADY | | | |
| | CAKNVSPKSYSGRYSISYFYGVDV | | YCAAWDDSLSGHYVFGTGTK | | | |
| | WGQGTTVTVSS | | VTVL | | | |
| 526 | EVQLLESGGGLVQPGGSLRLSCAD | 527 | QSALTQPPSVSAAPGQKVTISC | MERS- | MERS- | Choi et al., |
| | SGLTFSSYAMSWVRQAPGKGLEW | | SGSSSNIGNNYVSWYQHLPGT | CoV | CoV | WO2019/039891 |
| | VSAISVSGGSTYYSDSVKGRFTISR | | APKLLIYDNMRPSGIPDRFSGS | | | |
| | DNSKNTLSLQMNSLRAEDTAVYY | | KSGTSATLGITGLQTGDEADY | | | |
| | CVKARSIVGPFDYWGQGTLVTVSS | | YCGTWDTSLSAVVFGGGTKLT | | | |
| | | | VL | | | |
| 528 | EVQLVESGAEVVKPGASVKMSCK | 529 | DIVMTQSPASLTVSLGQRATIS | MERS- | MERS- | Zhou et al., 2019, |
| | ASGYPFTSYNIHWIKQTPGQGLEW | | CRASKSVSASGYNYLHWYQQ | CoV | CoV | Nature |
| | IGAIYPGNGDTSYTQKFKVKATLT | | RPGQPPKLLIYLAFNLESGVPA | | | Communications, |
| | SDKSSSTAYMQLSSLTSEDSAVYF | | RFNGSGSGTDFTLNIHPVEEED | | | 10: 3068 |
| | CARYGNYPSYAMDYWGQGTSVT | | AATYYCQHSRDLPFTFGSGTK | | | |
| | VSS | | LEIK | | | |
| 530 | QVQLVQSGAEVKKPGSSVKVSCK | 531 | QSVLTQPPSVSGAPGQRVTISC | MERS- | MERS- | Choi et al., |
| | ASGGTFSSYTINWVRQAPGQGLE | | TGSSSNIGAGYDVHWYQQLPG | CoV | CoV | WO2019/039891 |
| | WMGGIIPIFGTANYAQKFQGRVTIT | | TAPKVLIYGNSNRPSGVPDRFS | | | |
| | ADASTSTAYMELSSLRSEDTAVYY | | GSKSDTSASLAITGLQAEDEAD | | | |
| | CARVLLRSSSWFSSNWFDPWGQG | | YYCQSYDSSLSVVFGGGTKLT | | | |
| | TLVTVSS | | VL | | | |
| 532 | QVQLVQSGAEVKRPGSSVKVSCK | 533 | EIVLTQSPATLSLSPGERATLSC | MERS- | MERS- | Choi et al., |
| | TSGGTFNNNAINWVRQAPGQGLE | | GASQSVSSSYLAWYQQKPGLA | CoV | CoV | WO2019/039891 |
| | WMGGIIPFFGIAKYAQKFQGRVTIT | | PRLLIYDASSRATGIPDRFSGSG | | | |
| | ADESTSTAYMELSSLRSEDTAVYY | | SGTDFTLTISRLEPEDFAVYYC | | | |
| | CARDLPRESSYGSGSYYTHYYAM | | QQYGSSPLTFGGGTKVEIK | | | |
| | DVWGQGTTVTVSS | | | | | |
| 534 | QVQLVQSGAEVKKPGASVKVSCK | 535 | DIQMTQSPSTLSASVGDRVTIT | MERS- | MERS- | Choi et al., |
| | ASGYTFTTYYMHWVRQAPGQGLE | | CRASQTISTWLAWYQQKPGK | CoV | CoV | WO2019/039891 |
| | WMGIINPSGGSTSYAQKFQGRVTM | | APKLLIYKASSLESGVPSRFSG | | | |
| | TRDTSTSTVYMELSSLRSEDTAVY | | SGSGTEFTLTISSLQPDDFATY | | | |
| | YCARGAVVVILDYWGQGTLVTVS | | YCQQYNSYSYTFGQGTKLEIK | | | |
| | S | | | | | |
| 536 | EVQLLESGAEVKKPGSSVKVSCRA | 537 | QSVLTQPPSVSGAPGQRVTPSC | MERS- | MERS- | Niu et al., 2018, J. |
| | SGGTFSSYAISWVRQAPGQGLEW | | TGSSSNIGAGYDVHWYQQLPG | CoV | CoV | Infectious Diseases, |
| | MGRIIPILGIANYAQKFQGRVTITA | | TAPKLLIYGNSNRPSGVPDRFS | | | 218: 1249-1260 |
| | DKATSTAYMELSSLRSEDTAVYYC | | GSKSGTSASLAITGLQAEDEAD | | | |
| | ATRSGDYYGSGSYSAFDIWGQGT | | YYCQSYDSSLSGLMFGGGTKL | | | |
| | MVTVSS | | TVL | | | |
| 538 | QVQLVQSGAEVEKAGASVKVSCK | 539 | QSVLTQPPSVSAAPGQKVTISC | MERS- | MERS- | Niu et al., 2018, J. |
| | ASGGTFSSYAISWVRQAPGQGLEW | | SGSRSNIGNNYVSWYQQLPGT | CoV | CoV | Infectious Diseases, |
| | MGRIIPILGIANYAQKFQGRVTITA | | APKLLIYDNNKRPSGIPDRSSG | | | 218: 1249-1260 |
| | DKSTSTAYMELSSLRSEDTAVYYC | | SKSGTSAALGITGLQTGDEAD | | | |
| | ARRSGDYYGSGSYSAFDIWGQGT | | YYCGTWDNSLSAVVFGGGTK | | | |
| | MVTVSS | | LTVL | | | |
| 540 | QVQLVQSGAEVKKPGSSVKVSCK | 541 | QSVLTQPPSVSGAPGQRVTPSC | MERS- | MERS- | Niu et al., 2018, J. |
| | ASGGTFSSYAISWVRQAPGQGLEW | | TGSSSNIGAGYDVHWYQQLPG | CoV | CoV | Infectious Diseases, |
| | MGRIIPILGIANYAQKFQGRVTITA | | TAPKLLIYGNSNRPSGVPDRFS | | | 218: 1249-1260 |
| | DKSTSTAYMELSSLRSEDTAVYYC | | GSKSGTSASLAITGLQAEDEAD | | | |
| | ARRSGDYYGSGSYSAFDIWGQGT | | YYCQSYDSSLSGLMFGGGTKL | | | |
| | MVTVSS | | TVL | | | |
| 542 | QVQLVQSGAEVKKPGSSVKVSCK | 543 | QSVLTQPPSVSGAPGQRVTISC | MERS- | MERS- | Niu et al., 2018, J. |
| | ASGGTFSSYAISWVRQAPGQGLEW | | TGSSSNIGAGYDVHWYQQLPG | CoV | CoV | Infectious Diseases, |
| | MGRIIPILGIANYAQKFQGRVTITA | | TAPKLLIYGNSNRPSGVPDRFS | | | 218: 1249-1260 |
| | DKSTSTAYMELSSLRSEDTAVYYC | | GSKSGTSASLAITGLQAEDEAD | | | |
| | ARRSGDYYGSGSYSAFDIWGQGT | | YYCGTWDSSLSAYVVFGGGT | | | |
| | MVTVSS | | KLTVL | | | |
| 544 | QVQLVQSGAEVKKPGSSVKVSCK | 545 | SYELTQPASVSGSPGQSITISCT | MERS- | MERS- | Niu et al., 2018, J. |
| | ASGGTFSSYAISWVRQAPGQGLEW | | GSSTDVGSSIYVSWYQQHPGK | CoV | CoV | Infectious Diseases, |
| | MGRIIPILGIANYAQKFQGRVTITA | | APQLILYDVTNRPSGVSTRFSG | | | 218: 1249-1260 |
| | DKSTSTAYMELSSLRSEDTAVYYC | | SKSGNTASLTISGLRAEDEADY | | | |
| | ARATRSDYYGSGSYSAFDIWGQGT | | YCNSYTTSNTLVFGGGTKLTV | | | |
| | MVTVSS | | L | | | |
| 546 | QMQLVQSGAEVKKPGASVKVSCK | 547 | NFMLTQPPSVSGAPGQRVTISC | MERS- | MERS- | Niu et al., 2018, J. |
| | ASGGTFSSYAISWVRQAPGQGLEW | | TGSSSNIGAGYDVHWYQQLPG | CoV | CoV | Infectious Diseases, |
| | MGRIIPILGIANYAQKFQGRVTITA | | TAPKLLIYGNSNRPSGVPDRFS | | | 218: 1249-1260 |
| | DKSTSTAYMELSSLRSEDTAVYYC | | GSKSGTSASLAISGLRSEDEAD | | | |
| | ARRSGDYYGSGSYSAFDIWGQGT | | YYCAAWDDSLSGYVFGTGTK | | | |
| | MVTVSS | | VTVL | | | |
| 548 | QMQLVQSGAEVKKPGASVKVSCK | 549 | QSVLTQPPSVSGAPGQRVTISC | MERS- | MERS- | Niu et al., 2018, J. |
| | ASGGTFSSYAISWVRQAPGQGLEW | | TGSSSNIGAGYDVHWYQQLPG | CoV | CoV | Infectious Diseases, |
| | MGRIIPILGIANYAQKFQGRVTITA | | TAPKLLIYGNSNRPSGVPDRFS | | | 218: 1249-1260 |
| | DKSTSTAYMELSSLRSEDTAVYYC | | GSKSGTSASLAITGLQAEDEAD | | | |
| | ARRSGDYYGSGSYSAFDIWGQGT | | YYCGTWDSSLSAYVVFGGGT | | | |
| | MVTVSS | | KLTVL | | | |
| 550 | QVQLVQSGAEVKKPGSSVKVSCK | 551 | DVVMTQSPLSLPVTPGEPASIS | MERS- | MERS- | Niu et al., 2018, J. |
| | ASGGTFSSYAISWVRQAPGQGLEW | | CRSSQSLLHSNGYNYLDWYLQ | CoV | CoV | Infectious Diseases, |
| | MGRIIPILGIANYAQKFQGRVTITA | | KPGQSPQLLIYLGSNRASGVPD | | | 218: 1249-1260 |
| | DKSTSTAYMELSSLRSEDTAVYYC | | RFSGSGSGTDFTLKISRVEAED | | | |
| | ARDSYGDYTGSGYYYGMDVWGQ | | VGVYYCMQALQTPLTFGGGT | | | |
| | GTTVTVSS | | KVEIK | | | |
| 552 | EVQLVQSGAEVKKPGSSVKVSCK | 553 | DIVMTQSPLSLPVTPGEPASISC | MERS- | MERS- | Niu et al., 2018, J. |
| | ASGGTFSSYAISWVRQAPGQGLEW | | RSSQSLLHSNGYNYLDWYLQ | CoV | CoV | Infectious Diseases, |
| | MGRIIPILGIANYAQKFQGRVTITA | | KPGQSPQLLIYLGSNRASGVPD | | | 218: 1249-1260 |
| | DKSTSTAYMELSSLRSEDTAVYYC | | RFSGSGSGTDFTLKISRVEAED | | | |
| | ARDSYGDYTGSGYYYGMDVWGQ | | VGVYYCMQALQTPLTFGGGT | | | |
| | GTTVTVSS | | KVEIK | | | |
| 554 | EVRLVQSGAEVEKAGASVKVSCK | 555 | QSVLTQPPSVSAAPGQKVTISC | MERS- | MERS- | Niu et al., 2018, J. |
| | ASGGTFSSYAISWVRQAPGQGLEW | | SGSRSNIGNNYVSWYQRPPGT | CoV | CoV | Infectious Diseases, |
| | MGRIIPILGIANYAQKFQGRVTITA | | APKLLIYDNNKRPSGIPDRFSG | | | 218: 1249-1260 |
| | DKSTSTAYMELSSLRSEDTAVYYC | | SKSGTSATLGITGLQTGDEAD | | | |
| | ARRSGDYYGSGSYSAFDIWGQGT | | YYCGTWDNSLSAVVNGGGTK | | | |
| | MVTVSS | | NTVV | | | |
| 556 | QVQLVQSGAEVKKPGASVKVSCK | 557 | QSVLTQPPSVSGAPGQRVTISC | MERS- | MERS- | Niu et al., 2018, J. |
| | ASGGTFSSYAISWVRQAPGQGLEW | | TGSSSNIGAGYDVHWYQQLPG | CoV | CoV | Infectious Diseases, |
| | MGRIIPILGIANYAQKFQGRVTITA | | TAPKLLIYGNSNRPSGVPDRFS | | | 218: 1249-1260 |
| | DKSTSTAYMELSSLRSEDTAVYYC | | GSKSGTSASLAITGLQAEDEAD | | | |
| | ARRSGDYYGSGSYSAFDIWGQGT | | YYCGTWDSSLSAYVVFGGGT | | | |
| | MVTVSS | | KLTVL | | | |
| 558 | QVQLVQSGAEVKKPGSSVKVSCK | 559 | QYALTQPASVSGSPGQSITISCT | MERS- | MERS- | Niu et al., 2018, J. |
| | ASGGTFSSYAISWVRQAPGQGLEW | | GSSTDVGSSIYVSWYQQHPGK | CoV | CoV | Infectious Diseases, |
| | MGRIIPILGIANYAQKFQGRVTITA | | APQLILYDVTNRPSGVSTRFSG | | | 218: 1249-1260 |
| | DKSTSTAYMELSSLRSEDTAVYYC | | SKSGNTASLTISGLRAEDEADY | | | |
| | ARRSGDYYGSGSYSAFDIWGQGT | | YCNSYTTSNTLVFGGGTKLTV | | | |
| | MVTVSS | | L | | | |
| 560 | QVQLVQSGAEVKKPGSSVKVSCK | 561 | QSALTQPRSVSGSPGQSVTISC | MERS- | MERS- | Niu et al., 2018, J. |
| | ASGGTFSTYALSWVRQAPGQGLE | | TGTSSDVGGYNYVSWYQQHP | CoV | CoV | Infectious Diseases, |
| | WMGGIIPIFGTANYAQKFQGRVTIT | | GKAPKLMIYDVSKRPSGVPDR | | | 218: 1249-1260 |
| | ADESTSTAYMELNSLRSEDTAVYY | | FSGSKSGNTASLTISGLQAEDE | | | |
| | CARGSRSSSSAEYFQHWGQGTLVT | | ADYYCCSYAGSYTLEWFGGG | | | |
| | VSS | | TKLTVL | | | |
| 562 | QVQLVESGGGLVKPGGSLRLSCAA | 563 | QSALTQPPSVSGAPGQRVTISC | MERS- | MERS- | Niu et al., 2018, J. |
| | SGFTFSDYYMSWIRQAPGKGLEW | | TGSSSNIGASYDVHWYQHLPG | CoV | CoV | Infectious Diseases, |
| | VSYISSSGSTIYYADSVKGRFTISRD | | TAPKLLIYGNTNRPSGVPDRFS | | | 218: 1249-1260 |
| | NAKNSLYLQMNSLRAEDTAVYYC | | GSKSGTSASLAITGLQAEDEAD | | | |
| | ARVGLGSGWYDWFDPWGQGTLV | | YYCQSYDSSLSGWFSGGTKLT | | | |
| | TVSS | | VL | | | |
| 564 | QVQLVQSGAEVKKPGSSVKVSCK | 565 | DVVMTQSPLSLPVTPGEPASIS | MERS- | MERS- | Niu et al., 2018, J. |
| | ASGGTFSIYAISWVRQAPGQGLEW | | CRSSQSLLHSNGYNYLDWYLQ | CoV | CoV | Infectious Diseases, |
| | MGGIIPIFGTANYAQKFQGRVTITA | | KPGQSPQLLIYLGSNRASGVPD | | | 218: 1249-1260 |
| | DKSTSTAYMELSSLRSEDTAVYYC | | RFSGSGSGTDFTLKISRVEAED | | | |
| | AREGGHQGYCSGGSCYDFDYWG | | VGVYYCMQALQTPAFGGGTK | | | |
| | QGTLVTVSS | | LEIK | | | |
| 566 | QLQLQESGPGLVKPSETLSLTCTVS | 567 | QSALTQPASVSGSPGQSITISCT | MERS- | MERS- | Niu et al., 2018, J. |
| | GGSISSSSYYWGWIRQPPGKGLEW | | GTSSDVGGYNYVSWCQQHPG | CoV | CoV | Infectious Diseases, |
| | IGSIYYSGSTYYNPSLKSRVTISVDT | | KAPKLMIYEVSNRPSGVSNRFS | | | 218: 1249-1260 |
| | SKNQFSLKLSSVTAADTAVYYCAS | | GSKSGNTASLTISGLQAEDEAD | | | |
| | LLRPLIYCSGGSCTDYWGQGTLVT | | YYCSSYTSNITLVFGTGTKVTV | | | |
| | VSS | | L | | | |
| 568 | EVKLVESGGGLVKPGGSLKLSCAA | 569 | DIQMTQTTSSLSASLGDRVTIIC | MERS- | MERS- | Wang et al., 2015, |
| | SGFTFSSYAMSWVRQTPEKRLEW | | RASQDINNYLNWYQQKPDGT | CoV | CoV | Nature |
| | VATISSGGTYTYYPDSVKGRFTISR | | VKLLIYYTSRLHSGVPSRFSGS | | | Communications, |
| | DNAENTLYLQMSSLRSEDTAMYY | | GSGSDYSLTISNLEQEDIATYF | | | 6: 7712 |
| | CVRDGNSMDYWGQGTSVTVSS | | CQQANTLPPTFGAGTKLELR | | | |
| 570 | EVKLEESGGGLVKPGGSLKLSCAA | 571 | DVIMTQIPLSLPVSLGDQASISC | MERS- | | Wang et al., 2015, |
| | SGFTFSRYAMSWWQTPEKRLEWV | | RSSQSIVHSNGNTYLEWYLQK | CoV | | Nature |
| | ATINNGGSYSYYPDSVKGRLTISRD | | PGQSPKPLIYKVSNRISGVPDR | | | Communications, |
| | NAKNTLYLQMSSLRSEDTALYYC | | FSGSGSGTDFTLKISRVEAEDL | | | 6: 7712 |
| | ARHYDYDGYYYTMDFWGQGTSV | | GVYYCFQGSHVPYTFGGGTNL | | | |
| | TVSS | | EIK | | | |
| 572 | QVQLQESGPGLVKPSETLSLTCAV | 573 | DIQMSQTPSSLSASVGDRVTIT | MERS- | | Wang et al. |
| | SGGSISSNYWYWIRQSPVKGLEWI | | CRASQGINDYLNWYQQKPGK | CoV | | WO2016138160 |
| | GYIYGGSGGTEYNPSLKSRVTISTD | | APKLLIYYGNSLASGVPSRFSG | | | |
| | TSKNQFFLKLSSVTAADTAVYYCA | | SGSGTDFSLTISSLQPEDFATY | | | |
| | RSFYSWNGESWGQGVWTVSS | | YCQQGDSFPLTFGGGTKVDIK | | | |
| 574 | EVQLVQSGAEVKKPGASVKVSCK | 575 | QSALTQPPSLSASPGASARLPC | MERS-CoV | MERS-CoV | Wang et al. |
| | ASGHIFTSYVINWLQAEPGQGFEW | | TLSSDLSVGSKNMYWYQQKP | | | WO2016138160 |
| | MGGIHPGNGGRDYAQKFQGRVTI | | GSAPRLFLYYYSDSDKQLGPG | | | |
| | TADMSTSTVYMELRSLRSEDMAV | | VPNRVSGSKETSSNTAFLLISG | | | |
| | YYCAASSGSYGVSSLDVWGRGVL | | LQPEDEADYYCQVYDSSANW | | | |
| | VTVSS | | VFGGGTRLTVL | | | |
| 576 | QVQLQQSGGELVKPGASVKLSCK | 577 | QLVLTQSPASLAVSLGQRATIS | MERS- | MERS- | Wang et al., 2019, |
| | TSGFTFSSSYISWLKQKPGQSLEWI | | CRASESVDNYGISFMNWF'QQK | CoV | CoV | Cell Reports, |
| | AWIYAGTGGTEYNQKFTGKAQVT | | PGQPPKLLIHTASNQGSGVPAR | | | 28(13): 3395-3405 |
| | VDTSSSTAYMQFSSLTTEDSAIYYC | | FSGSGSGTDFSLNIHPVEDDDT | | | |
| | ARGGSSFAMDYWGQGTSVTVSS | | AMYFCQQSEEVPLTFGAGTKL | | | |
| | | | EIK | | | |
| 578 | QVQLQQSGPELVRPGVSVKISCKG | 579 | DIVLTQSPASLAVSLGQRATIS | MERS- | MERS- | Pallesen et al., |
| | SGYTFTDYAIHWVKQSHAKSLEWI | | CRASESVDNYGISFMNWFQQK | CoV | CoV | PNAS, 2017, |
| | GVFSTYYGNTNYNQKFKGRATMT | | PGQPPKLLISATSNQGSGVPAR | | | 114(35): E7348-E7357 |
| | VDKSSSTAYMELARLTSEDSAIYY | | FIGSGSGTDFSLNIHPVEEDDT | | | |
| | CARKSYYVDYVDAMDYWGQGTS | | AMYFCQQSKEVPRTFGGGTKL | | | |
| | VTVSS | | EIK | | | |
| 580 | EVQLVESGGGLVQPGGSLRLSCSA | 581 | DIQMTQSPSTLSASVGDRVTIT | MERS- | MERS- | WO2015179535 |
| | SGFYFSSYDMSWVRQAPGKGLEW | | CRASQTISSWLAWYQQKPGK | CoV | CoV | |
| | VSAIRGSGHTTYYADSVKGRFTISR | | APKLLIYKASSLESGVPSRFSG | | | |
| | DNSKNTLYLEMNSLRAEDTAVYY | | SGSGTEFTLTISSLQPDDFATY | | | |
| | CVKDGSIVGFDPWGQGTLVTVSS | | YCQQYNSYSYTFGQGTKLEIK | | | |
| 582 | QVQLVQSGAEVKKPGSSVKVSCK | 583 | DIVMTQSPLSLPVTPGEPASISC | MERS- | MERS- | WO2015179535 |
| | ASGGSFSVYAISWVRQAPGQGLE | | RSSQSLLHGNGYNYLDWYLQ | CoV | CoV | |
| | WMGGIIPIFGTANYAQKFQDRFTIT | | KPGQSPQLLIYLVSHRASGVPD | | | |
| | TDESTSTAYMELSSLRSEDTAMYY | | RFSGSGSGTDFTLKISRVEAED | | | |
| | CAREGDIVVLPAGKGGMDVWGQ | | VGVYYCMQALQSPWTFGQGT | | | |
| | GTTVTVSS | | KVEIK | | | |
| 584 | EVQLVESGGGLVQPGGSLRLSCVV | 585 | DIQMTQSPSALSASVGDRVTIT | MERS- | MERS- | WO2015179535 |
| | SGFTFSNYDMSWVRQAPGRGLEW | | CRASQSISSWLAWYQQKPGKA | CoV | CoV | |
| | VSAIRGSGFNTYYADSVKGRFTISR | | PKLLIYKASSLESGVPSRFSGS | | | |
| | DNSKNTLYLQMNSLRAEDTAVYY | | GSGTEFTLTISSLQPDDFATYY | | | |
| | CAKDGSIVSMDYWGQGTLVTVSS | | CQQYNSYSWTFGQGTKVEIK | | | |
| 586 | QVQLQESGPGLVKPSETLSLTCTVS | 587 | EIVMTQSPATLSLSPGERATLS | MERS- | MERS- | WO2015179535 |
| | GGSISSYYWSWIRQPPGKGLEWIG | | CRASQSVSSNLAWYQQKPGQ | CoV | CoV | |
| | YIYYSGSPNYNPSLKSRVTISVDTS | | APRLLIYGASTRATGIPARFSG | | | |
| | KNQFSLKLTSVTAADTAVYYCARS | | SGSGTEFTLTISSLQSEDFAVY | | | |
| | LNWGPPFDYWGQGTLVTVSS | | YCQQFNNWPYTFGQGTKLEIK | | | |
| 588 | EVQLLESGGGLVQPGGSLRLSCAA | 589 | DIQMTQSPSSLSASVGDRVTIT | MERS- | MERS- | WO2015179535 |
| | SGFTFSSYAMSWVRQAPGKGLEW | | CQASQDISNYLNWYQQKPGK | CoV | CoV | |
| | VSAISGRGGNTYYADSVKGRFTIS | | APKFLIYDASNLETGVPSRFSG | | | |
| | RDNSKNTLFLQMNTLRAEDTAVY | | SGSGTDFTFTISSLQPEDIATYY | | | |
| | YCAKDRGFGFFDIWGRGTLATVSS | | CQQYDNLPFTFGPGTKINIK | | | |
| 590 | EVQLLESGPGVVRPSETLSLSCAVS | 591 | EIVMTQSPATLSLSPGERATLS | MERS- | MERS- | WO2016138160 |
| | GGSISDSYRWSWIRQPPGKGLEWV | | CRASQSVSSNLAWYQQKPGQ | CoV | CoV | |
| | GYIFATGTTTNYNPSLKSRVTISKD | | APRLLIHSASSRATGIPDRFSGS | | | |
| | TSKNQFSLKLSSVTAADTAVYYCA | | GSGTEFSLTISSLEAEDVGVYH | | | |
| | REPFKYCSGGVCYAHKDNSLDVW | | CYQHSSGYTFGPGTKLDIK | | | |
| | GQGVLVTVSS | | | | | |
| 592 | QVQLQESGPGLVKPSETLSLTCAV | 593 | DIVMTQTPFTLPVTPGEAASIS | MERS- | MERS- | WO2016138160 |
| | SGGSISSNYWNWIRQSPGKGLEWI | | CRSSQSLFDSDYGNTYLDWYL | CoV | CoV | |
| | GYIYGGSGSTTYNPSLKSRVAISTD | | QKPGQSPQLLIYMLSNRASGV | | | |
| | TSKDQFSLKLSSVTAADTAVYYCA | | PDRFSGSGSGTDFTLKISRVEA | | | |
| | RLLPLGGGYCFDYWGQGVLVTVS | | EDVGLYYCMQSVEYPFTFGPG | | | |
| | S | | TKLDIK | | | |
| 594 | QVQLQESGPGLVKPSETLSLTCAV | 595 | DIQMTQSPSSLSASVGDRVTIT | MERS- | MERS- | WO2016138160 |
| | SGDSISSNYWSWIRQPPGKGLEWI | | CRASQDINNYLSWYQQKPGK | CoV | CoV | |
| | GRFSGSGGSTDFNPSLKSRVTISTD | | APKPLIYYASSLETGVPSRFSG | | | |
| | TSKNQFSLNLRSVTAADTAVYYCA | | SRSGTDYTLTISSLQLEDFATY | | | |
| | KTYSGTFDYWGQGVLVTVSS | | YCQQYNNSPYSFGQGTKVEIK | | | |
| 596 | EVQLVESGGGLVKPGGSLRLSCAA | 597 | ELVLTQPPSASGTPGQRVNISC | MERS- | MERS- | KR101828794 |
| | SGFAFSSYSMIWVRQAPGKGLEW | | SGSRSNVGSNAVTWYQQVPG | CoV | CoV | |
| | VSSISTSSGYIYYADSVKGRFTISRD | | TAPKLLIYNNSKRPSGVPDRFS | | | |
| | NAKNSLYLQMNSLRAEDTAVYYC | | GSKSGTSASLAISGLQSEEEAD | | | |
| | ARAPIDAVAFDIWGQGTMVTVSS | | YYCAAWDDSLNGPVFGGGTK | | | |
| | | | VTVL | | | |
| 598 | EVQLLESGGGLVKPGGSLRLSCEA | 599 | QSALTQPASVSGSPGQSITISCT | MERS- | MERS- | Corti et al., PNAS, |
| | SGLTFSNVWMSWVRQAPGKGLE | | GTSSDVGTYDLVSWYQQHPG | CoV | CoV | 2015, 112(33): 10473- |
| | WVGRIKRKSEGAFIDYGAPVKGR | | KSPKLMIYADIKRPSGVSHRFS | | | 10478 |
| | FTLSRDDSKNTVYLQMNSLKIDDT | | GSKSGNTASLTISGLQSADEAD | | | |
| | AVYYCSTLTRGGDVWSSSYYFDY | | YYCCLYAGSSTSVIFGGGTKVT | | | |
| | WGQGALVTVSS | | | | | |
| 600 | QVQLKGSGPGLVAPSQSLSITCTVS | 601 | DIQMTQSPASLSASVGETVTIT | MERS- | MERS- | Li et al., Cell Res., |
| | GFSLTGYGVNWVRQPPGKGLEWL | | CRASENIYSYLAWYQQKQGKS | CoV | CoV | 2015, |
| | GMIWGDGSTDYNSALKSRLSISKD | | PQLLVYNAKTLAEGVPSRFSG | | | |
| | NSKSQVFLKMNSLQTDDTARYYC | | SGSGTQFSLKINSLQPEDFGSY | | | |
| | ARVGDYGDYFDYWGQGTTLTVSS | | YCQHHYGTPWFGGGTKLEIK | | | |
| 602 | EVQLVQSGAEVKKPGSSVKVSCK | 603 | ETTLTQSPATLSVSPGERAILSC | MERS- | MERS- | Tang et al., PNAS, |
| | ASGGTFSSYAISWVRQAPGQGLEW | | RASQSISNDLAWYQQKPGQAP | CoV | CoV | 2014, E2018-E2026. |
| | MGGIIPIFGIANYAQKFQGRVTITA | | RLLIYGASSRATGIPDRFSGSGS | | | |
| | DKSTSTAYMELSSLRSEDTAVYYC | | GTDFTFTISRLESEDFAVYYCQ | | | |
| | ASSNYYGSGSYYPRSAFDIWGQGT | | QYGVSPLTFGGGTKVEIK | | | |
| | TVTVSS | | | | | |
| 604 | QVQLVQSGAEVKKPGSSVKVSCK | 605 | DIQLTQSPSSLSASVGDRVTITC | MERS- | MERS- | Ying et al, J. of |
| | ASGGTFSSYAISWVRQAPGQGLEW | | RASQGIRNDLGWYQQKPGKA | CoV | CoV | Virology, 2014, |
| | MGGIIPIFGTASYAQKFQGRVTITA | | PKLLIYAASSLQSGVPSRFSGS | | | 88(14)7796-7805 |
| | DKSTSTAYMELSSLRSEDTAVYYC | | GSGTDFTLTISSLQPEDFATYY | | | |
| | ARVGYCSSTSCNRGAFDIWGQGT | | CQQLNSYPLTFGGGTKVEIK | | | |
| | MVTVSS | | | | | |
| 606 | QVQLQQSGAEVKKPGSSVKVSCK | 607 | EIVLTQSPLSLPVTPGEPASISC | MERS- | MERS- | Ying et al, J. of |
| | ASGGTFSSYTISWVRQAPGQGLEW | | RSSQSLLHSNGYNYLDWYLQ | CoV | CoV | Virology, 2014, |
| | MGRIIPIFGTANYAQKFQGRVTITA | | KPGKSPQLLIYLGSNRASGVPD | | | 88(14): 7796-7805 |
| | DKSTSTAYMELSSLRSEDTAVYYC | | RFSGSGSGTDFTLKISRVEAED | | | |
| | ARDLGPGGDSSGYYYGPGAFDIW | | VGVYYCMQALQTPLTFGGGT | | | |
| | GQGTMVTVSS | | KVEIK | | | |
| 608 | QVQLQQSGAEVKKRGSSVKVSCK | 609 | EIVMTQSPVTLSLSPGERATLS | MERS- | MERS- | Ying et al, J. of |
| | ASGGTFSSYTISWVRQAPGQGLEW | | CRASQSVSSYLAWYQQKPGQ | CoV | CoV | Virology, 2014, |
| | MGRIIPILGIANYAQKFQGRVTITA | | APRLLIYDASNRATGIPARFSG | | | 88(14): 7796-7805 |
| | DKSTSTAYMELSSLRSEDTAVYYC | | SGSGTDFTLTISSLEPEDFAVY | | | |
| | ARDLYDSSGYYRNTDAFDIWGQG | | YCQQYGSSPWTFGQGTKVEIK | | | |
| | TMVTVSS | | | | | |
| 610 | ATRLEESGAEVKKPGSSVKVSCKA | 611 | DVELTQSPGTLSLSPGERATLS | MERS- | MERS- | Chen et al., J. of |
| | SGGTFSSYAISWVRQAPGQGLEW | | CRASQSVSSSYLAWYQQKPGQ | CoV | CoV | Infectious Diseases, |
| | MGRIIPILGIANYAQKFQGRVTITA | | APRLLIYGASSRATGIPDRFSGS | | | 2017, 215(12): 1807- |
| | DKSTSTAYMELSSLRSEDTAVYYC | | GSGTDFTLTISRLEPEDFAVYY | | | 1815 |
| | ASKQGDYYDRTSYAFDIWGQGTM | | CQQYGSSPITFGQGTRLEIK | | | |
| | VTVSS | | | | | |
| 612 | VQLLETGGGLVKPGGSLRLSCAAS | 613 | DIRLTQSPSFLSASVGDRVTITC | MERS- | MERS- | Jiang et al., Science |
| | GFSLSDYYMNWIRQAPGKGLEWV | | RASQDINSFLAWYQQRPGKAP | CoV | CoV | Translational |
| | AYISSSSGYTNYGDSVKGRFTISRD | | KLLIYGASNLETGVPSRFSGGG | | | Medicine, 2014, |
| | HAKNSLYLQMNSLRVEDTAVYYC | | SGTDFTLTISSLQPEDIATYYCQ | | | 6(234): 234ra59 |
| | VRDRDDFWSGYYKHWGLGTLVT | | QYDKLPTFGQGTRLEIK | | | |
| | VSS | | | | | |
| 614 | VQLVESGGGLVQPGRSLRLSCAAS | 615 | QPVLTQSPSASGTPGQRVTISC | MERS- | MERS- | Zhang et al., 2018 |
| | GFTFSNYAMYWVRQAPGKGLEW | | SGSSSNIGNNYVYWYQQLPGT | CoV | CoV | Cell Reports, |
| | VALISYDISTDYYADSVKGRFTISR | | APKLLIYWNDQRPSGVPDRFS | | | 24(2): 441-452 |
| | DNSKNTIYLQMNNLRTEDTALYY | | GSKSGTSASLAISGLRSEDEAD | | | |
| | CAGNDYWGQGTLVTVSS | | YYCAAWDDSLSGAVFGGGTQ | | | |
| | | | LTVL | | | |
| 616 | EVQLVESGGGLVQPGRSLRLSCAA | 617 | GSQPVLTQSPSASGTPGQRVTI | MERS- | MERS- | Zhang et al., 2018 |
| | SGFTFSNYAMYWVRQAPGKGLEW | | SCSGSSSNIGNNYVYWYQQLP | CoV | CoV | Cell Reports, |
| | VALISYDISTDYYADSVKGRFTISR | | GTAPKLLIYWNDQRPSGVPDR | | | 24(2): 441-452 |
| | DNSKNTIYLQMNNLRTEDTALYY | | FSGSKSGTSASLAISGLRSEDE | | | |
| | CTNTYYWGQGTLVTVS | | ADYYCAAWDDSLSGAVFGGG | | | |
| | | | TQLTVL | | | |
| 618 | EVQLLESGGGLVQPGGSLRLSCAA | 619 | DIQMTQSPSSLSASVGDRVTIT | MERS- | MERS- | Pascal et al, PNAS, |
| | SGFTFSSYAMSWVRQAPGKGLEW | | CQASQDISNYLNWYQQKPGK | CoV | CoV | 2015, 112(28): 8738- |
| | VSAISGRGGNTYYADSVKGRFTIS | | APKFLIYDASNLETGVPSRFSG | | | 8743 |
| | RDNSKNTLFLQMNTLRAEDTAVY | | SGSGTDFTFTISSLQPEDIATYY | | | |
| | YCAKDRGFGFFDIWGRGTLATVSS | | CQQYDNLPFTFGPGTKINIK | | | |
| 620 | EVQLVESGGGLVQPGGSLRLSCVV | 621 | DIQMTQSPSALSASVGDRVTIT | MERS- | MERS- | Pascal et al, PNAS, |
| | SGFTFSNYDMSWVRQAPGRGLEW | | CRASQSISSWLAWYQQKPGKA | CoV | CoV | 2015, 112(28): 8738- |
| | VSAIRGSGFNTYYADSVKGRFTISR | | PKLLIYKASSLESGVPSRFSGS | | | 8743 |
| | DNSKNTLYLQMNSLRAEDTAVYY | | GSGTEFTLTISSLQPDDFATYY | | | |
| | CAKDGSIVSMDYWGQGTLVTVSS | | CQQYNSYSWTFGQGTKVEIK | | | |
| 622 | EVQLVESGGGLVQPGGSLRLSCAA | 623 | DIQMTQSPSSLSASVGDRVTIT | MERS- | MERS- | KR101828794 |
| | SGFTFSSYAMHWVRQAPGKGLEW | | CRASQSISNYLNWYQQKPGKA | CoV | CoV | |
| | VSSIYSSGGYIYYADSVKGRFTISR | | PKLLIYDASRLQSGVPSRFSGS | | | |
| | DNSKNTLYLQMNSLRAEDTAVYY | | GSGTDFTLTISSLQPEDFATYY | | | |
| | CAKDQYVSTDFDIWGQGTLVTVSS | | CQQSYSYPWTFGQGTKVEIK | | | |
| 624 | EVQLVESGGGLVQPGGSLRLSCAA | 625 | DIQMTQSPSSLSASVGDRVTIT | MERS- | MERS- | KR101828794 |
| | SGFTFSSYGMSWVRQAPGKGLEW | | CRASQSIGSYLNWYQQKPGKA | CoV | CoV | |
| | VSAISQSGGYIYYADSVKGRFTISR | | PKLLIYAASNLQSGVPSRFSGS | | | |
| | DNSKNTLYLQMNSLRAEDTAVYY | | GSGTDFTLTISSLQPEDFATYY | | | |
| | CAKHLYGSWAFDIWGQGTLVTVSS | | CQQSYSFPFTFGQGTKVEIK | | | |
| 626 | EVQLVESGGGLVQPGGSLRLSCAA | 627 | DIQMTQSPSSLSASVGDRVTIT | MERS- | MERS- | KR101828794 |
| | SGFTFSDYAMSWVRQAPGKGLEW | | CRASQSISSYLNWYQQKPGKA | CoV | CoV | |
| | VSAISQSGSYTNYADSVKGRFTISR | | PKLLIYGASSLQSGVPSRFSGS | | | |
| | DNSKNTLYLQMNSLRAEDTAVYY | | GSGTDFTLTISSLQPEDFATYY | | | |
| | CAKVSSQTLRFDYWGQGTLVTVSS | | CQQSYSFPFTFGQGTKVEIK | | | |
| 628 | QVQLQESGPGLVKPSETLSLTCSVS | 629 | EIVMTQSPATLSVSPGERATLS | SARS- | SARS- | Wang et al., Nature |
| | GGSISSHYWSWIRQPPGKGLEWIG | | CRASQSVSSSLAWYQQKPGQA | CoV1, | CoV2 and | Communications, |
| | YIYYSGSTNHNPSLKSRVTISVDTS | | PRLLIYGASTRAPGIPARFSGSG | SARS- | SARS- | (2020) 11: 2251 |
| | KNQFSLKLSSVTAADTAVYYCAR | | SGTEFTLTISSLQSEDFAVYYC | CoV2 | CoV1 | |
| | GVLLWFGEPIFEIWGQGTMVTVSS | | QQYNNWPLTFGGGTKVEI | | | |
| 630 | EVQLQQSGPVLVKPGASVRMSCK | 631 | NIMMTQSPSSLAVSAGEKVTM | SARS- | MERS- | Sauer et al., Nature |
| | ASGYTITDYYLNWVKQSHGKSLE | | SCKSSQSVLHSSDQKNYLAWY | CoV2, | CoV, | Structural & |
| | WLGVLNPYSGGSLYSQTFKGKAT | | QQKPGQSPKLLIYWASTRESG | MERS- | HKU4, | Molecular Biology |
| | LTVDRSSSTAYLELNSLTSEDSAVY | | VPDRFTGSGSGTDFTLTISSVQ | CoV, | OC43 | 28: 478-486(2021) |
| | YCARQLGRGNGLDYWGQGTSVT | | AEDLAVYFCHQYLSSYTFGGG | HKU4, | | |
| | VSS | | TKLEIK | OC43 | | |
| 632 | EVQLVQSGAEVKKPGESLKISCKG | 633 | QSVLTQPPSASGTPGQRVTISC | SARS- | SARS- | Scheid et al., 2021 |
| | SGYSFTSYWIGWVRQMPGKGLEW | | SGSSSNIGSDHVYWYQQLPGT | CoV2; | CoV2; | (sciencedirect.com/ |
| | MGVIYPGDSDTRYSPSFQGQVTISA | | APKLFIYRNNQRPSGVPDRFSG | SARS- | SARS- | science/article/pii/ |
| | DKSISTAYLQWSSLKASDTAMYYC | | SKSGTSASLAISGLRSEDEADY | CoV1 | CoV1 | S0092867421005353) |
| | ARTQWGYNYGSHFFYMDVWGKG | | YCAAWDASLSGYVFGTGTKV | | | |
| | TTVTVSS | | TVL | | | |
| 634 | QVQLVQSGAEVKKPGSSVKVSCK | 635 | EIVLTQSPGTLSLSPGERATLSC | SARS- | SARS- | Rogers et al., 2020 |
| | ASGGTFSSSAISWVRQAPGQGLEW | | RASQSVSSSYLAWYQQKPGQ | CoV1, | CoV2 | (science.sciencemag. |
| | MGGIIPILDITNYAQKFQGRVTITA | | APRLLIYGASSRATGIPDRFSGS | SARS- | and | org/content/early/ |
| | DKSTSTAFMELSSLRSEDTAVYYC | | GSGTDFTLTISRLEPEDFAVYY | CoV2 | SARS- | 2020/06/15/ |
| | ALRNQWDLLVYWGQGTLVTVSS | | CQHYGSSLWTFGQGTKLEIK | | CoV1 | science.abc7520) |
| 636 | VQLQQESGPGLVKPSETLSLTCTVS | 637 | DIVMTQSPSSLSASVGDRVTIT | SARS- | SARS- | Brouwer et al., 2020 |
| | GGSISSSSYYWGWIRQPPGKGLEW | | CRASQSISNYLNWYQQKPGKA | CoV1, | CoV1, | (science.sciencemag. |
| | IGSIYYSGSTYYNPSLKSRVTISVDT | | PKLLLYAASDLQSGVPSRFSGS | SARS- | SARS- | org/content/early/ |
| | SKNQFSLKLSSVTAADTAVYYCAR | | GSGTDFTLTISSLQPEDFATYY | CoV2 | CoV2 | 2020/06/15/science. |
| | RSTSRWGYYYMDVWGKGTRVTV | | CQQSYSTHMSTFGQGTKVDIK | | (weak) | abc5902) |
| | SS | | | | | |
| 638 | QVQLQESGPGLVKPSETLSLTCTVS | 639 | SYVLTQPPSVSVAPGQTARITC | SARS- | SARS- | Jennewein et al., |
| | GGSISSYYWSWIRQPPGKGLEWIG | | GGNNIGSKTVHWYQQKPGQA | CoV2; | CoV2; | 2021(biorxiv.org/ |
| | YVYYSGSTNYNPSLKSRVTISVDTS | | PVLVVYDDSDRPSGIPERFSGS | SARS- | SARS- | content/10.1101/2021. |
| | KNEFSLKLSSVTAADTAVYYCASS | | NSGNTATLTISRVEAGDEADY | CoV1 | CoV1 | 03.23.436684v1) |
| | QRPDGNLYYFDYWGQGTLVTVSS | | YCQVWDSSSDHYVFGTGTKV | | | |
| | | | TVL | | | |
| 640 | EVQLVQSGAEVKKPGATVKISCKV | 641 | IVLTQSPFQSVSPKEKVTITCRA | SARS- | SARS- | Zhe Lv et al., 2020 |
| | SGYSFSNYYIHWVKQAPGKSLEWI | | SQSISSNLHWYQQKPDQSPKL | CoV1, | CoV1, | (Science, doi: |
| | GYIDPFNGGTSDNLKFKGAATLTA | | LIKYASQSISGIPSRFSGSGSGT | SARS- | SARS- | 10.1126/science. |
| | DTSTDTAYMELSSLRSEDTAVYYC | | DFTLTINSLEAEDFGIYFCQQT | CoV2 | CoV2 | abc5881) |
| | ARSEYDPYYVMDYWGQGTTVTVSS | | NFWPYIFGQGTKLEIL | | | |
| 642 | QVQLQQSGAEVKKPGSSVKVSCK | 643 | SYELTQPPSVSVAPGKTARITC | SARS- | SARS- | Rouet et al., 2021 |
| | ASGGTFSTYSISWVRQAPGQGLEW | | GGNNIGSKSVHWYQQKPGQA | CoV1, | CoV1, | (MAbs doi: |
| | MGGIAPSHGFANYAQKFQGRVTIT | | PVLVVYDDSDRPSGIPERFSGS | SARS- | SARS- | 10.1080/19420862. |
| | TDESTSTAYMELSSLRSEDTAVYY | | NSGNTATLTISRVEAGDEADY | CoV2 | CoV2 | 2021.1922134) |
| | CARDTATGGMDVWGQGTTVTVSS | | YCQVWDTYSDYVFGTGTKVT | | | |
| | | | VL | | | |
| 644 | VQLVESGGGLVQPGGSLRLSCAAS | 645 | DIEMTQSPSSLSAAVGDRVTIT | SARS- | SARS- | Pinto et al., Nature |
| | GFTFSSYDMHWVRQTTGKGLEWV | | CRASQSIGSYLNWYQQKPGKA | CoV1, | CoV1, | 583: 290-295 (2020) |
| | STIGTAGDTYYPDSVKGRFTISRED | | PKLLIYAASSLQSGVPSRFSGS | SARS- | SARS- | |
| | AKNSLYLQMNSLRAGDTAVYYCA | | GSGTDFTLTISSLQPEDFAIYYC | CoV2 | CoV2 | |
| | RGDSSGYYYYFDYWGQGTLLTVSS | | QQSYVSPTYTFGPGTKVDIK | | (weak) | |
| 646 | QVQLVQSGPEVKKPGTSVRVSCK | 647 | DIVLTQTPGTLSLSPGERATLS | SARS- | SARS- | Starr, TN, et al., |
| | ASGFTFTSSAVQWVRQARGQRLE | | CRASQSVSSSYLAWYQQKPGQ | CoV2, | CoV2, | Nature, 2021 Jul 14. |
| | WVGWIVVGSGNTNYAQKFHERVT | | APRLLIYGASSRATGIPDRFSGS | SARS- | SARS- | doi: 10.1038/s41586- |
| | ITRDMSTSTAYMELSSLRSEDTAV | | GSGTDFTLTISRLEPEDFAVYY | CoV1 | CoV1 | 021-03807-6. |
| | YYCASPYCSGGSCSDGFDIWGQGT | | CQQYVGLTGWTFGQGTKVEIK | | | |
| | MVTVSS | | | | | |
| 648 | EVQLVESGGGLVNPGGSLRLSCAA | 649 | VTQPASVSGSPGQSITISCTGTS | SARS- | SARS- | PDB: 7LXX; |
| | SGFTFSDYTIHWVRQAPGKGLEW | | SDVGGYNYVSWYQQHPGKAP | CoV2 | CoV2 | McCallum et al., |
| | VSSISSSSNYIYYADSVKGRFTISRD | | KLMIYDVSDRPSGVSNRFSGS | | | (2021) Cell 184: |
| | NAKNSLSLQMNSLRAEDTAVYYC | | KSGNTASLTISGLQAEDEADY | | | 2332 |
| | ARDGNAYKWLLAENVRFDYWGQ | | YCSSYTSSSTPNWVFGGGTKLT | | | |
| | GTLVTVSS | | | | | |
| 650 | VQLVESGGGVVQPGRSLRLSCAAS | 651 | YELTQPPSVSVSPGQTARITCS | SARS- | SARS- | PDB: 7LY2; |
| | GFTFSSYGMHWVRQAPGKGLEWV | | GDALAKHYAYWYRQKPGQAP | CoV2 | CoV2 | McCallum et al., |
| | TVIWYDGSNRYYADSVKGRFTISR | | VLVIYKDSERPSGIPERFSGSSS | | | (2021) Cell 184: |
| | DNSKNTLYLQMDSLRAEDTAVYY | | GTTVTLTISGVQAEDEADYYC | | | 2332 |
| | CARAVAGEWYFDYWGQGTLVTVS | | QSADSIGSSWVFGGGTKLTV | | | |
| 652 | VQLVESGGGVVQPGRSLRLSCAAS | 653 | YELTQPPSVSTARITCGGNNIE | SARS- | SARS- | PDB: 7LXW; |
| | GFTFSNYGMHWVRQAPGKGLEW | | RKSVHWCQQKPGQAPALVVY | CoV2 | CoV2 | McCallum et al., |
| | VAVIWYDGSNKFYADSVKGRFTIS | | DDSDRPSGIPERFSGSNSGNTA | | | (2021) Cell 184: |
| | RDNSKNSLYLQMNSLRAEDTAVY | | TLTISRVEAGDEADYYCQVWD | | | 2332 |
| | FCARAFPDSSSWSGFTIDYWGQGT | | SGSDQVIFGGGTKLT | | | |
| | LVTV | | | | | |
| 654 | EVQLVESGGGLVKPGGSLRLSCAA | 655 | QPVLTQPPSVSGAPGQRITISCT | SARS- | SARS- | Rappazzo, et al |
| | SGFTFSSYYMNWVRQAPGKGLEW | | GSSSNIGAGYDVHWYQQLPGT | CoV2 | CoV2 | Science 371: 823-829 |
| | VSSISSDGYNTYYPDSLKGRFTISR | | APKLLIYGSSSRPSGVPDRFSG | | | DOI: 10.1126/ |
| | DSAKNSLYLQMNSLRADDTAVYY | | SKSGTSASLAITGLQAEDEADY | | | science.abf4830 |
| | CARDFSGHTAVAGTGFEYWGQGT | | YCQSYDSSLSVLYVFGTGTKV | | | |
| | LVTVSS | | TVL | | | |

*Sequence, binding, and neutralization data derived from the CoV-AbDab database: opig.stats.ox.ac.uk/webapps/covabdab/(last visited July 22, 2021)(Raybould, MIJ, et al., Bioinformatics doi = 10.1093/bioinformatics/btaa739(2020)).

The application's sequence listing, which the Patent Office published only in electronic form, follows.

SEQUENCE LISTING (655 sequences)

SEQ ID NO: 1 - protein, 453 aa, Homo sapiens [sequence omitted]

SEQ ID NO: 2 - protein, 453 aa, Homo sapiens
GSASAPTLFPLVSCENSPSDTSSVAVGCLAQDFLPDSITFSWKYKNNSDISSTRGFPSVLRGGKYAATSQVLLPSKDVMQGTDEHVVCKVQHPNGNKEKNVPLPVIAELPPKVSVFVPPRDGFFGNPRKSKLICQATGFSPRQIQVSWLREGKQVGSGVTTDQVQAEAKESGPTTYKVTSTLTIKESDWLGQSMFTCRVDHRGLTFQQNASSMCVPDQDTAIRVFAIPPSFASIFLTKSTKLTCLVTDLTTYDSVTISWTRQNGEAVKTHTNISESHPNATFSAVGEASICEDDWNSGERFTCTVTHTDLPSPLKQTISRPKGVALHRPDVYLLPPAREQLNLRESATITCLVTGFSPADVFVQWMQRGQPLSPEKYVTSAPMPEPQAPGRYFAHSILTVSEEEWNTGETYTCVVAHEALPNRVTERTVDKSTGKPTLYNVSLVMSDTAGTCY

SEQ ID NO: 3 - protein, 353 aa, Homo sapiens
ASPTSPKVFPLSLCSTQPDGNVVIACLVQGFFPQEPLSVTWSESGQGVTARNFPPSQDASGDLYTTSSQLTLPATQCLAGKSVTCHVKHYTNPSQDVTVPCPVPSTPPTPSPSTPPTPSPSCCHPRLSLHRPALEDLLLGSEANLTCTLTGLRDASGVTFTWTPSSGKSAVQGPPERDLCGCYSVSSVLPGCAEPWNHGKTFTCTAAYPESKTPLTATLSKSGNTFRPEVHLLPPPSEELALNELVTLTCLARGFSPKDVLVRWLQGSQELPREKYLTWASRQEPSQGTTTFAVTSILRVAAEDWKKGDTFSCMVGHEALPLAFTQKTIDRLAGKPTHVNVSVVMAEVDGTCY

SEQ ID NO: 4 - protein, 340 aa, Homo sapiens
ASPTSPKVFPLSLDSTPQDGNVVVACLVQGFFPQEPLSVTWSESGQNVTARNFPPSQDASGDLYTTSSQLTLPATQCPDGKSVTCHVKHYTNSSQDVTVPCRVPPPPPCCHPRLSLHRPALEDLLLGSEANLTCTLTGLRDASGATFTWTPSSGKSAVQGPPERDLCGCYSVSSVLPGCAQPWNHGETFTCTAAHPELKTPLTANITKSGNTFRPEVHLLPPPSEELALNELVTLTCLARGFSPKDVLVRWLQGSQELPREKYLTWASRQEPSQGTTTYAVTSILRVAAEDWKKGETFSCMVGHEALPLAFTQKTIDRMAGKPTHINVSVVMAEADGTCY

SEQ ID NO: 5 - protein, 764 aa, Homo sapiens
MLLFVLTCLLAVFPAISTKSPIFGPEEVNSVEGNSVSITCYYPPTSVNRHTRKYWCRQGARGGCITLISSEGYVSSKYAGRANLTNFPENGTFVVNIAQLSQDDSGRYKCGLGINSRGLSFDVSLEVSQGPGLLNDTKVYTVDLGRTVTINCPFKTENAQKRKSLYKQIGLYPVLVIDSSGYVNPNYTGRIRLDIQGTGQLLFSVVINQLRLSDAGQYLCQAGDDSNSNKKNADLQVLKPEPELVYEDLRGSVTFHCALGPEVANVAKFLCRQSSGENCDVVVNTLGKRAPAFEGRILLNPQDKDGSFSVVITGLRKEDAGRYLCGAHSDGQLQEGSPIQAWQLFVNEESTIPRSPTVVKGVAGGSVAVLCPYNRKESKSIKYWCLWEGAQNGRCPLLVDSEGWVKAQYEGRLSLLEEPGNGTFTVILNQLTSRDAGFYWCLTNGDTLWRTTVEIKIIEGEPNLKVPGNVTAVLGETLKVPCHFPCKFSSYEKYWCKWNNTGCQALPSQDEGPSKAFVNCDENSRLVSLTLNLVTRADEGWYWCGVKQGHFYGETAAVYVAVEERKAAGSRDVSLAKADAAPDEKVLDSGFREIENKAIQDPRLFAEEKAVADTRDQADGSRASVDSGSSEEQGGSSRALVSTLVPLGLVLAVGAVAVGVARARHRKNVDRVSIRSYRTDISMSDFENSREFGANDNMGASSITQETSLGGKEEFVATTESTTETKEPKKAKRSSKEEAEMAYKDFLLQSSTVAAEAQDGPQEA

SEQ ID NO: 6 - protein, 159 aa, Homo sapiens
MKNHLLFWGVLAVFIKAVHVKAQEDERIVLVDNKCKCARITSRIIRSSEDPNEDIVERNIRIIVPLNNRENISDPTSPLRTRFVYHLSDLCKKCDPTEVELDNQIVTATQSNICDEDSATETCYTYDRNKCYTAVVPLVYGGETKMVETALTPDACYPD

SEQ ID NO: 7 - protein, 137 aa, Homo sapiens
QEDERIVLVDNKCKCARITSRIIRSSEDPNEDIVERNIRIIVPLNNRENISDPTSPLRTRFVYHLSDLCKKCDPTEVELDNQIVTATQSNICDEDSATETCYTYDRNKCYTAVVPLVYGGETKMVETALTPDACYPD

SEQ ID NO: 8 - protein, 137 aa, Artificial Sequence
  Description of Artificial Sequence: Synthetic polypeptide
QEDERIVLVDNKCKCARITSRIIRSSEDPNEDIVERNIRIIVPLNNRENISDPTSPLRTRFVYHLSDLCKKCDPTEVELDNQIVTATQSNICDEDSATETCATYDRNKCYTAVVPLVYGGETKMVETALTPDACYPD

SEQ ID NO: 9 - protein, 5 aa, Artificial Sequence
  Description of Artificial Sequence: Synthetic peptide
GGGGS

SEQ ID NO: 10 - protein, 10 aa, Artificial Sequence
  Description of Artificial Sequence: Synthetic peptide
GGGGSGGGGS

SEQ ID NO: 11 - protein, 15 aa, Artificial Sequence
  Description of Artificial Sequence: Synthetic peptide
GGGGSGGGGSGGGGS

SEQ ID NO: 12 - protein, 20 aa, Artificial Sequence
  Description of Artificial Sequence: Synthetic peptide
GGGGSGGGGSGGGGSGGGGS

SEQ ID NO: 13 - protein, 25 aa, Artificial Sequence
  Description of Artificial Sequence: Synthetic peptide
GGGGSGGGGSGGGGSGGGGSGGGGS

SEQ ID NO: 14 - protein, 805 aa, Homo sapiens [sequence omitted]

SEQ ID NO: 15 - protein, 978 aa, Artificial Sequence
  Description of Artificial Sequence: Synthetic polypeptide
QSTIEEQAKTFLDKFNHEAEDLFYQSSLASWNYNTNITEENVQNMNNAGDKWSAFLKEQSTLAQMYPLQEIQNLTVKLQLQALQQNGSSVLSEDKSKRLNTILNTMSTIYSTGKVCNPDNPQECLLLEPGLNEIMANSLDYNERLWAWESWRSEVGKQLRPLYEEYVVLKNEMARANHYEDYGDYWRGDYEVNGVDGYDYSRGQLIEDVEHTFEEIKPLYEHLHAYVRAKLMNAYPSYISPIGCLPAHLLGDMWGRFWTNLYSLTVPFGQKPNIDVTDAMVDQAWDAQRIFKEAEKFFVSVGLPNMTQGFWENSMLTDPGNVQKAVCHPTAWDLGKGDFRILMCTKVTMDDFLTAHHEMGHIQYDMAYAAQPFLLRNGANEGFHEAVGEIMSLSAATPKHLKSIGLLSPDFQEDNETEINFLLKQALTIVGTLPFTYMLEKWRWMVFKGEIPKDQWMKKWWEMKREIVGVVEPVPHDETYCDPASLFHVSNDYSFIRYYTRTLYQFQFQEALCQAAKHEGPLHKCDISNSTEAGQKLFNMLRLGKSEPWTLALENVVGAKNMNVRPLLNYFEPLFTWLKDQNKNSFVGWSTDWSPYADQSIKVRISLKSALGDKAYEWNDNEMYLFRSSVAYAMRQYFLKVKNQMILFGEEDVRVANLKPRISFNFFVTAPKNVSDIIPRTEVEKAIRMSRSRINDAFRLNDNSLEFLGIQPTLGPPNQPPVSVEPKSSDKTHTCPPCPAPDQDTAIRVFAIPPSFASIFLTKSTKLTCLVTDLTTYDSVTISWTRQNGEAVKTHTNISESHPNATFSAVGEASICEDDWNSGERFTCTVTHTDLASSLKQTISRPKGVALHRPDVYLLPPAREQLNLRESATITCLVTGFSPADVFVQWMQRGQPLSPEKYVTSAPMPEPQAPGRYFAHSILTVSEEEWNTGETYTCVVAHEALPNRVTERTVDKSTGKPTLYNVSLVMSDTAGTCY

SEQ ID NO: 16 - protein, 1255 aa, Severe acute respiratory syndrome-related coronavirus
MFIFLLFLTLTSGSDLDRCTTFDDVQAPNYTQHTSSMRGVYYPDEIFRSDTLYLTQDLFLPFYSNVTGFHTINHTFGNPVIPFKDGIYFAATEKSNVVRGWVFGSTMNNKSQSVIIINNSTNVVIRACNFELCDNPFFAVSKPMGTQTHTMIFDNAFNCTFEYISDAFSLDVSEKSGNFKHLREFVFKNKDGFLYVYKGYQPIDVVRDLPSGFNTLKPIFKLPLGINITNFRAILTAFSPAQDIWGTSAAAYFVGYLKPTTFMLKYDENGTITDAVDCSQNPLAELKCSVKSFEIDKGIYQTSNFRVVPSGDVVRFPNITNLCPFGEVFNATKFPSVYAWERKKISNCVADYSVLYNSTFFSTFKCYGVSATKLNDLCFSNVYADSFVVKGDDVRQIAPGQTGVIADYNYKLPDDFMGCVLAWNTRNIDATSTGNYNYKYRYLRHGKLRPFERDISNVPFSPDGKPCTPPALNCYWPLNDYGFYTTTGIGYQPYRVVVLSFELLNAPATVCGPKLSTDLIKNQCVNFNFNGLTGTGVLTPSSKRFQPFQQFGRDVSDFTDSVRDPKTSEILDISPCSFGGVSVITPGTNASSEVAVLYQDVNCTDVSTAIHADQLTPAWRIYSTGNNVFQTQAGCLIGAEHVDTSYECDIPIGAGICASYHTVSLLRSTSQKSIVAYTMSLGADSSIAYSNNTIAIPTNFSISITTEVMPVSMAKTSVDCNMYICGDSTECANLLLQYGSFCTQLNRALSGIAAEQDRNTREVFAQVKQMYKTPTLKYFGGFNFSQILPDPLKPTKRSFIEDLLFNKVTLADAGFMKQYGECLGDINARDLICAQKFNGLTVLPPLLTDDMIAAYTAALVSGTATAGWTFGAGAALQIPFAMQMAYRFNGIGVTQNVLYENQKQIANQFNKAISQIQESLTTTSTALGKLQDVVNQNAQALNTLVKQLSSNFGAISSVLNDILSRLDKVEAEVQIDRLITGRLQSLQTYVTQQLIRAAEIRASANLAATKMSECVLGQSKRVDFCGKGYHLMSFPQAAPHGVVFLHVTYVPSQERNFTTAPAICHEGKAYFPREGVFVFNGTSWFITQRNFFSPQIITTDNTFVSGNCDVVIGIINNTVYDPLQPELDSFKEELDKYFKNHTSPDVDLGDISGINASVVNIQKEIDRLNEVAKNLNESLIDLQELGKYEQYIKWPWYVWLGFIAGLIAIVMVTILLCCMTSCCSCLKGACSCGSCCKFDEDDSEPVLKGVKLHYT

SEQ ID NO: 17 - protein, 1273 aa, Severe acute respiratory syndrome coronavirus 2
MFVFLVLLPLVSSQCVNLTTRTQLPPAYTNSFTRGVYYPDKVFRSSVLHSTQDLFLPFFSNVTWFHAIHVSGTNGTKRFDNPVLPFNDGVYFASTEKSNIIRGWIFGTTLDSKTQSLLIVNNATNVVIKVCEFQFCNDPFLGVYYHKNNKSWMESEFRVYSSANNCTFEYVSQPFLMDLEGKQGNFKNLREFVFKNIDGYFKIYSKHTPINLVRDLPQGFSALEPLVDLPIGINITRFQTLLALHRSYLTPGDSSSGWTAGAAAYYVGYLQPRTFLLKYNENGTITDAVDCALDPLSETKCTLKSFTVEKGIYQTSNFRVQPTESIVRFPNITNLCPFGEVFNATRFASVYAWNRKRISNCVADYSVLYNSASFSTFKCYGVSPTKLNDLCFTNVYADSFVIRGDEVRQIAPGQTGKIADYNYKLPDDFTGCVIAWNSNNLDSKVGGNYNYLYRLFRKSNLKPFERDISTEIYQAGSTPCNGVEGFNCYFPLQSYGFQPTNGVGYQPYRVVVLSFELLHAPATVCGPKKSTNLVKNKCVNFNFNGLTGTGVLTESNKKFLPFQQFGRDIADTTDAVRDPQTLEILDITPCSFGGVSVITPGTNTSNQVAVLYQDVNCTEVPVAIHADQLTPTWRVYSTGSNVFQTRAGCLIGAEHVNNSYECDIPIGAGICASYQTQTNSPRRARSVASQSIIAYTMSLGAENSVAYSNNSIAIPTNFTISVTTEILPVSMTKTSVDCTMYICGDSTECSNLLLQYGSFCTQLNRALTGIAVEQDKNTQEVFAQVKQIYKTPPIKDFGGFNFSQILPDPSKPSKRSFIEDLLFNKVTLADAGFIKQYGDCLGDIAARDLICAQKFNGLTVLPPLLTDEMIAQYTSALLAGTITSGWTFGAGAALQIPFAMQMAYRFNGIGVTQNVLYENQKLIANQFNSAIGKIQDSLSSTASALGKLQDVVNQNAQALNTLVKQLSSNFGAISSVLNDILSRLDKVEAEVQIDRLITGRLQSLQTYVTQQLIRAAEIRASANLAATKMSECVLGQSKRVDFCGKGYHLMSFPQSAPHGVVFLHVTYVPAQEKNFTTAPAICHDGKAHFPREGVFVSNGTHWFVTQRNFYEPQIITTDNTFVSGNCDVVIGIVNNTVYDPLQPELDSFKEELDKYFKNHTSPDVDLGDISGINASVVNIQKEIDRLNEVAKNLNESLIDLQELGKYEQYIKWPWYIWLGFIAGLIAIVMVTIMLCCMTSCCSCLKGCCSCGSCCKFDEDDSEPVLKGVKLHYT

SEQ ID NO: 18 - protein, 1353 aa, Middle East respiratory syndrome-related coronavirus
MIHSVFLLMFLLTPTESYVDVGPDSVKSACIEVDIQQTFFDKTWPRPIDVSKADGIIYPQGRTYSNITITYQGLFPYQGDHGDMYVYSAGHATGTTPQKLFVANYSQDVKQFANGFVVRIGAAANSTGTVIISPSTSATIRKIYPAFMLGSSVGNFSDGKMGRFFNHTLVLLPDGCGTLLRAFYCILEPRSGNHCPAGNSYTSFATYHTPATDCSDGNYNRNASLNSFKEYFNLRNCTFMYTYNITEDEILEWFGITQTAQGVHLFSSRYVDLYGGNMFQFATLPVYDTIKYYSIIPHSIRSIQSDRKAWAAFYVYKLQPLTFLLDFSVDGYIRRAIDCGFNDLSQLHCSYESFDVESGVYSVSSFEAKPSGSVVEQAEGVECDFSPLLSGTPPQVYNFKRLVFTNCNYNLTKLLSLFSVNDFTCSQISPAAIASNCYSSLILDYFSYPLSMKSDLSVSSAGPISQFNYKQSFSNPTCLILATVPHNLTTITKPLKYSYINKCSRFLSDDRTEVPQLVNANQYSPCVSIVPSTVWEDGDYYRKQLSPLEGGGWLVASGSTVAMTEQLQMGFGITVQYGTDTNSVCPKLEFANDTKIASQLGNCVEYSLYGVSGRGVFQNCTAVGVRQQRFVYDAYQNLVGYYSDDGNYYCLRACVSVPVSVIYDKETKTHATLFGSVACEHISSTMSQYSRSTRSMLKRRDSTYGPLQTPVGCVLGLVNSSLFVEDCKLPLGQSLCALPDTPSTLTPRSVRSVPGEMRLASIAFNHPIQVDQLNSSYFKLSIPTNFSFGVTQEYIQTTIQKVTVDCKQYVCNGFQKCEQLLREYGQFCSKINQALHGANLRQDDSVRNLFASVKSSQSSPIIPGFGGDFNLTLLEPVSISTGSRSARSAIEDLLFDKVTIADPGYMQGYDDCMQQGPASARDLICAQYVAGYKVLPPLMDVNMEAAYTSSLLGSIAGVGWTAGLSSFAAIPFAQSIFYRLNGVGITQQVLSENQKLIANKFNQALGAMQTGFTTTNEAFHKVQDAVNNNAQALSKLASELSNTFGAISASIGDIIQRLDVLEQDAQIDRLINGRLTTLNAFVAQQLVRSESAALSAQLAKDKVNECVKAQSKRSGFCGQGTHIVSFVVNAPNGLYFMHVGYYPSNHIEVVSAYGLCDAANPTNCIAPVNGYFIKTNNTRIVDEWSYTGSSFYAPEPITSLNTKYVAPQVTYQNISTNLPPPLLGNSTGIDFQDELDEFFKNVSTSIPNFGSLTQINTTLLDLTYEMLSLQQVVKALNESYIDLKELGNYTYYNKWPWYIWLGFIAGLVALALCVFFILCCTGCGTNCMGKLKCNRCCDRYEEYDLEPHKVHVH

SEQ ID NO: 19 - protein, 114 aa, Artificial Sequence
  Description of Artificial Sequence: Synthetic polypeptide
QVQLVESGGGLVQAGGSLRLSCAASGFPVRKANMHWYRQAPGKEREWVAAIMSKGEQTVYADSVEGRFTISRDNAKNTVYLQMNSLKPEDTAVYYCRVFVGWHYFGQGTQVTVS

SEQ ID NO: 20 - protein, 115 aa, Artificial Sequence
  Description of Artificial Sequence: Synthetic polypeptide
QVQLVESGGGLVQAGGSLRLSCATSGFPVYQANMHWYRQAPGKEREWVAAIQSYGDGTHYADSVKGRFTISRDNAKNTVYLQMNSLKPEDTAVYYCRAVYVGMHYFGQGTQVTVS

SEQ ID NO: 21 - protein, 114 aa, Artificial Sequence
  Description of Artificial Sequence: Synthetic polypeptide
QVQLVESGGGLVQAGGSLRLSCAASGFPVNYKTMWWYRQAPGKEREWVAAIWSYGHTTHYADSVKGRFTISRDNAKNTVYLQMNSLKPEDTAVYYCVVWVGHNYEGQGTQVTVS

SEQ ID NO: 22 - protein, 114 aa, Artificial Sequence
  Description of Artificial Sequence: Synthetic polypeptide
QVQLVESGGGLVQAGGSLRLSCAASGFPVYAQNMHWYRQAPGKEREWVAAIYSHGYWTLYADSVKGRFTISRDNAKNTVYLQMNSLKPEDTAVYYCEVQVGAWYTGQGTQVTVS

SEQ ID NO: 23 - protein, 114 aa, Artificial Sequence
  Description of Artificial Sequence: Synthetic polypeptide
QVQLVESGGGLVQAGGSLRLSCAASGFPVFSGHMHWYRQAPGKEREWVAAILSNGDSTHYADSVKGRFTISRDNAKNTVYLQMNSLKPEDTAVYYCRVHVGAHYFGQGTQVTVS

SEQ ID NO: 24 - protein, 114 aa, Artificial Sequence
  Description of Artificial Sequence: Synthetic polypeptide
QVQLVESGGGLVQAGGSLRLSCAASGFPVEQGRMYWYRQAPGKEREWVAAIISHGTVTVYADSVKGRFTISRDNAKNTVYLQMNSLKPEDTAVYYCYVYVGAQYWGQGTQVTVS

SEQ ID NO: 25 - protein, 114 aa, Artificial Sequence
  Description of Artificial Sequence: Synthetic polypeptide
QVQLVESGGGLVQAGGSLRLSCAASGFPVLFTYMHWYRQAPGKEREWVAAIWSSGNSTWYADSVKGRFTISRDNAKNTVYLQMNSLKPEDTAVYYCFVKVGNWYAGQGTQVTVS

SEQ ID NO: 26 - protein, 114 aa, Artificial Sequence
  Description of Artificial Sequence: Synthetic polypeptide
QVQLVESGGGLVQAGGSLRLSCAASGFPVNAGNMHWYRQAPGKEREWVAAIQSYGRTTYYADSVKGRFTISRDNAKNTVYLQMNSLKPEDTAVYYCRVFVGMHYFGQGTQVTVS

SEQ ID NO: 27 - protein, 114 aa, Artificial Sequence
  Description of Artificial Sequence: Synthetic polypeptide
QVQLVESGGGLVQAGGSLRLSCAASGFPVSSSTMTWYRQAPGKEREWVAAINSYGWETHYADSVKGRFTISRDNAKNTVYLQMNSLKPEDTAVYYCYVYVGGSYIGQGTQVTVS

SEQ ID NO: 28 - protein, 114 aa, Artificial Sequence
  Description of Artificial Sequence: Synthetic polypeptide
QVQLVESGGGLVQAGGSLRLSCAASGFPVQSHYMRWYRQAPGKEREWVAAIESTGHHTAYADSVKGRFTISRDNAKNTVYLQMNSLKPEDTAVYYCTVYVGYEYHGQGTQVTVS

SEQ ID NO: 29 - protein, 114 aa, Artificial Sequence
  Description of Artificial Sequence: Synthetic polypeptide
QVQLVESGGGLVQAGGSLRLSCAASGFPVETENMHWYRQAPGKEREWVAAIYSHGMWTAYADSVKGRFTISRDNTKNTVYLQMNSLKPEDTAVYYCEVEVGKWYFGQGTQVTVS

SEQ ID NO: 30 - protein, 114 aa, Artificial Sequence
  Description of Artificial Sequence: Synthetic polypeptide
QVQLVESGGGLVQAGGSLRLSCAASGFPVKASRMYWYRQAPGKEREWVAAIQSFGEVTWYADSVKGRFTISRDNAKNTVYLQMNSLKPEDTAVYYCYVWVGQEYWGQGTQVTVS

SEQ ID NO: 31 - protein, 114 aa, Artificial Sequence
  Description of Artificial Sequence: Synthetic polypeptide
QVQLVESGGGLVQAGGSLRLSCAASGFPVYASNMHWYRQAPGKEREWVAAIESQGYMTAYADSVKGRFTISRDNAKNTVYLQMNSLKPEDTAVYYCWVIVGEYYVGQGTQVTVS

SEQ ID NO: 32 - protein, 114 aa, Artificial Sequence
  Description of Artificial Sequence: Synthetic polypeptide
QVQLVESGGGLVQAGGSLRLSCAASGFPVQAREMEWYRQAPGKEREWVAAIKSTGTYTAYAYSVKGRFTISRDNAKNTVYLQMNSLKPEDTAVYYCYVYVGSSYIGQGTQVTVS

SEQ ID NO: 33 - protein, 114 aa, Artificial Sequence
  Description of Artificial Sequence: Synthetic polypeptide
QVQLVESGGGLVQAGGSLRLSCAASGFPVKNFEMEWYRKAPGKEREWVAAIQSGGVETYYADSVKGRFTISRDNAKNTVYLQMNSLKPEDTAVYYCFVYVGRSYIGQGTQVTVS

SEQ ID NO: 34 - protein, 115 aa, Artificial Sequence
  Description of Artificial Sequence: Synthetic polypeptide
QVQLVESGGGLVQAGGSLRLSCAASGFPVAYKTMWWYRQAPGKEREWVAAIESYGIKWTRYADSVKGRFTISRDNAKNTVYLQMNSLKPEDTAVYYCIVWVGAQYHGQGTQVTVS

SEQ ID NO: 35 - protein, 114 aa, Artificial Sequence
  Description of Artificial Sequence: Synthetic polypeptide
QVQLVESGGGLVQAGGSLRLSCAASGFPVAGRNMWWYRQAPGKEREWVAAIYSSGTYTEYADSVKGRFTISRDNAKNTVYLQMNSLKPEDTAVYYCHVWVGSLYKGQGTQVTVS

SEQ ID NO: 36 - protein, 114 aa, Artificial Sequence
  Description of Artificial Sequence: Synthetic polypeptide
QVQLVESGGGLVQAGGSLRLSCAASGFPVKHARMWWYRQAPGKEREWVAAIDSHGDTTWYADSVKGRFTISRDNAKNTVYLQMNSLKPEDTAVYYCYVYVGASYWGQGTQVTVS

SEQ ID NO: 37 - protein, 114 aa, Artificial Sequence
  Description of Artificial Sequence: Synthetic polypeptide
QVQLVESGGGLVQAGGSLRLSCAASGFPVNSHEMTWYRQAPGKEREWVAAIQSTGTVTEYADSVKGRFTISRDNAKNTVYLQMNSLKPEDTAVYYCYVYVGSSYLGQGTQVTVS

SEQ ID NO: 38 - protein, 114 aa, Artificial Sequence
  Description of Artificial Sequence: Synthetic polypeptide
QVQLVESGGGLVQAGGSLRLSCAASGFPVEQREMEWYRQAPGKEREWVAAIDSNGNYTFYADSVKGRFTISRDNAKNTVYLQMNSLKPEDTAVYYCYVYVGKSYIGQGTQVTVS

SEQ ID NO: 39 - protein, 114 aa, Artificial Sequence
  Description of Artificial Sequence: Synthetic polypeptide
QVQLVESGGGLVQAGGSLRLSCAASGFPVKHHWMFWYRQAPGKEREWVAAIKSYGYGTEYADSVKGRFTISRDNAKNTVYLQMNSLKPEDTAVYYCFVGVGTHYAGQGTQVTVS

SEQ ID NO: 40 - protein, 114 aa, Artificial Sequence
  Description of Artificial Sequence: Synthetic polypeptide
QVQLVESGGGLVQAGGSLRLSCAASGFPVYAAEMEWYRQAPGKEREWVAAISSQGTITYYADSVKGRFTISRDNAKNTVYLQMNSLKPEDTAVYYCFVYVGKSYIGQGTQVSVS

SEQ ID NO: 41 - protein, 114 aa, Artificial Sequence; identical to SEQ ID NO: 40
  Description of Artificial Sequence: Synthetic polypeptide

SEQ ID NO: 42 - protein, 120 aa, Artificial Sequence
  Description of Artificial Sequence: Synthetic polypeptide
QVQLVESGGGLVQAGGSLRLSCAASGFPVHAWEMAWYRQAPGKEREWVAAIRSFGSSTHYADSVKGRFTISRDNAKNTVYLQMNSLKPEDTAVYYCNVKDFGTHHYAYDYWGQGTQVTVS

SEQ ID NO: 43 - protein, 120 aa, Artificial Sequence
  Description of Artificial Sequence: Synthetic polypeptide
QVQLVESGGGLVQAGGSLRLSCAASGFPVNTWWMHWYRQAPGKEREWVAAITSWGFRTYYADSVKGRFTISRDNAKNTVYLQMNSLKPEDTAVYYCNVKDKGMAVQWYDYWGQGTQVTVS

SEQ ID NO: 44 - protein, 120 aa, Artificial Sequence
  Description of Artificial Sequence: Synthetic polypeptide
QVQLVESGGGLVQAGGSLRLSCAASGFPVYNTWMEWYRQAPGKEREWVAAITSHGYKTYYADSVKGRFTISRDNAKNTVYLQMNSLKPEDTAVYYCNVKDEGDMFTAYDYWGQGTQVTVS

SEQ ID NO: 45 - protein, 120 aa, Artificial Sequence
  Description of Artificial Sequence: Synthetic polypeptide
QVQLVESGGGLVQAGGSLRLSCAASGFPVYHSTMFWYRQAPGKEREWVAAIYSSGQHTYYADSVKGRFTISRDNAKNTVYLQMNSLKPEDTAVYYCNVKDSGQWRQEYDYWGQGTQVTVS

SEQ ID NO: 46 - protein, 119 aa, Artificial Sequence
  Description of Artificial Sequence: Synthetic polypeptide
QVQLVESGGGLVQAGGSLRLSCAASGFPVEHEMAWYRQAPGKEREWVAAIRSMGRKTLYADSVKGRFTISRDNAKNTVYLQMNSLKPEDTAVYYCNVKDFGYTWHEYDYWGQGTQVTVS

SEQ ID NO: 47 - protein, 120 aa, Artificial Sequence
  Description of Artificial Sequence: Synthetic polypeptide
QVQLVESGGGLVQAGGSLRLSCAASGFPVTMAWMWWYRQAPGKEREWVAAIRSEGVRTYYADSVKGRFTISRDNAKNTVYLQMNSLKPEDTAVYYCNVKDYGQAHAYYDYWGQGTQVTVS

SEQ ID NO: 48 - protein, 120 aa, Artificial Sequence
  Description of Artificial Sequence: Synthetic polypeptide
QVQLVESGGGLVQAGGSLRLSCAASGFPVNSHFMEWYRQAPGKEREWVAAIQHSSGFHTYYADSVKGRFTISRDNAKNTVYLQMNSLKPEDTAVYYCNVKDTGTTEDYDYWGQGTQVTVS

SEQ ID NO: 49 - protein, 120 aa, Artificial Sequence
  Description of Artificial Sequence: Synthetic polypeptide
QVQLDESGGGLVQAGGSLRLSCAASGFPVYHAWMEWYRQAPGKEREWVAAITSSGRHTYYADSVKGRFTISRDNAKNTVYLQMNSLKPEDTAVYYCNVKDAGRVYNSYDYWGQGTQVTVS

SEQ ID NO: 50 - protein, 120 aa, Artificial Sequence
  Description of Artificial Sequence: Synthetic polypeptide
QVQLVESGGGLVQAGGSLRLSCAASGFPVAHAWMEWYRQAPGKEREWVAAITSYGYKTYYADSVKGRFTISRDNAKNTVYLQMNSLKPEDTAVYYCNVKDTGTYRFYYDYWGQGTQVTVS

SEQ ID NO: 51 - protein, 119 aa, Artificial Sequence
  Description of Artificial Sequence: Synthetic polypeptide
QVQLVESGGGLVQAGGSLRLSCAASGFPVWNQTMVWYRQAPGKEREWVAAIWSMGHTYYADSVKGRFTISRDNAKNTVYLQMNSLKPEDTAVYYCNVKDAGVYNRYYDYWGQGTQVTVS

SEQ ID NO: 52 - protein, 120 aa, Artificial Sequence
  Description of Artificial Sequence: Synthetic polypeptide
QVQLVESGGGLVQAGGSLRLSCAASGFPVEHYWMEWYRQAPGKEREWVAAITSFGYRTYYADSVKGRFTISRDNAKNTVYLQMNSLKPEDTAVYYCNVKDWGFASHAYDYWGQGIQVTVS

SEQ ID NO: 53 - protein, 120 aa, Artificial Sequence
  Description of Artificial Sequence: Synthetic polypeptide
QVQLVESGGGLVQAGGSLRLSCAASGFPEIAWEMAWYRQAPGKEREWVAAIRSFGERTLYADSVKGRFTISRDNAKNTVYLQMNSLKPEDTAVYYCNVKDFGWQHQEYDYWGQGTQVTVS

SEQ ID NO: 54 - protein, 120 aa, Artificial Sequence
  Description of Artificial Sequence: Synthetic polypeptide
QVQLVESGGGLVQAGGSLRLSCAASGFPVYHAYMEWYRQAPGKEREWVAAIYSNGEHTYYADSVKGRFTISRDNAKNTVYLQMNSLKPEDTAVYYCNVKDSGSFNQAYDYWGQGTQVTVS

SEQ ID NO: 55 - protein, 120 aa, Artificial Sequence
  Description of Artificial Sequence: Synthetic polypeptide
QVQLVESGGGLVQAGGSLRLSCAASGFPVEWSHMHWYRQAPGKEREWVAAIVSKGGYTLYADSVKGRFTISRDNAKNTVYLQMNSLKPEDTAVYYCNVKDYGVHFKRYDYWGQGTQVTVI

SEQ ID NO: 56 - protein, 120 aa, Artificial Sequence
  Description of Artificial Sequence: Synthetic polypeptide
QVQLVESGGGLVQAGGSLRLSCAASGFPVFHVWMEWYRQAPGKEREWVAAIDSAGWHTYYADSVKGRFTISRDNAKNTVYLQMNSLKPEDTAVYYCNVKDAGNTTSAYDYWGQGTQVTVS

SEQ ID NO: 57 - protein, 120 aa, Artificial Sequence
  Description of Artificial Sequence: Synthetic polypeptide
QVQLVESGGGLVQAGGSLRLSCAASGFPVYYNWMEWYRQAPGKEREWVAAIHSNGDETFYADSVKGRFTISRDNAKNTVYLQMNSLKPEDTAVYYCNVKDIDAEAYAYDYWGQGTQVTVS

SEQ ID NO: 58 - protein, 120 aa, Artificial Sequence
  Description of Artificial Sequence: Synthetic polypeptide
QVQLVESGGGLVQAGGSLRLSCAASGFPVYHVWMEWYRQAPGKEREWVAAITSSGSHTYYADSVKGRFTISRDNAKNTVYLQMNSLKPEDTAVYYCNVKDSGQWRVQYDYWGQGTQVTVS

SEQ ID NO: 59 - protein, 120 aa, Artificial Sequence
  Description of Artificial Sequence: Synthetic polypeptide
QVQLVESGGGLVQAGGSLRLSCAASGFPVYWHHMHWYRQAPGKEREWVAAIISWGWYTTYADSVKGRFTISRDNAKNTVYLQMNSLKPEDTAVYYCNVKDHGAQNQMYDYWGQGTQVTVS

SEQ ID NO: 60 - protein, 120 aa, Artificial Sequence
  Description of Artificial Sequence: Synthetic polypeptide
QVQLVESGGGLVQAGGSLRLSCAASGFPVYRDRMAWYRQAPGKEREWVAAIYSAGQQTRYADSVKGRFTISRDNAKNTVYLQMNSLKPEDTAVYYCNVKDVGHHYEYYDYWGQGTQVTVS

SEQ ID NO: 61 - protein, 120 aa, Artificial Sequence
  Description of Artificial Sequence: Synthetic polypeptide
QVQLVESGGGLVQAGGSLRLSCAASGFPVDNGYMHWYRQAPGKEREWVAAIDSYGWHTIYADSVKGRFTISRDNAKNTVYLQMNSLKPEDTAVYYCNVKDKGQMRAAYDYWGQGTQVTVS

SEQ ID NO: 62 - protein, 120 aa, Artificial Sequence
  Description of Artificial Sequence: Synthetic polypeptide
QVQLVESGGGLVQAGGSLRLSCAASGFPVSWHSMYWYRQAPGKEREWVAAIFSEGDWTYYADSVKGRFTISRDNAKNTVYLQMNSLKPEDTAVYYCNVKDYGSSYYKYDYWGQGTQVTVS

SEQ ID NO: 63 - protein, 120 aa, Artificial Sequence
  Description of Artificial Sequence: Synthetic polypeptide
QVQLVESGGGLVQAGGSLRLSCAASGFPVSQSVMAWYRQAPGKEREWVAAIYSKGQYTHYADSVKGRFTISRDNAKNTVYLQMNSLKPEDTAVYYCNVKDAGSSYWDYDYWGQGTQVTVS

SEQ ID NO: 64 - protein, 124 aa, Artificial Sequence
  Description of Artificial Sequence: Synthetic polypeptide
QVQLVESGGGSVQAGGSLRLSCAASGSIGQIEYLGWFRQAPGKEREGVAALNTWTGRTYYADSVKGRFTVSLDNAKNTVYLQMNSLKPEDTALYYCAAARWGRTKPLNTYYYSYWGQGTPVTVS

SEQ ID NO: 65 - protein, 123 aa, Artificial Sequence
  Description of Artificial Sequence: Synthetic polypeptide
QVQLVESGGGSVQAGGSLRLSCAASGYIDKIVYLGWFRQAPGKEREGVAALYTLSGHTYYADSVKGRFTVSLDNAKNTVYLQMNSLKPEDTALYYCAAATEGHAHALYRLHYYWGQGTQVTVS

SEQ ID NO: 66 - protein, 114 aa, Artificial Sequence
  Description of Artificial Sequence: Synthetic polypeptide
QVQLVESGGGLVQAGGSLRLSCAASGFPVYQGEMHWYRQAPGKEREWVAAIRSTGVQTWYADSVKGRFTISRDNAKNTVYLQMNSLKPEDTAVYYCRVWVGTHYFGQGTQVTVS

SEQ ID NO: 67 - protein, 124 aa, Artificial Sequence
  Description of Artificial Sequence: Synthetic polypeptide
QVQLVESGGGSVQAGGSLRLSCAASGNIQRIYYLGWFRQAPGKEREGVAALMTYTGHTYYADSVKGRFTVSLDNAKNTVYLQMNSLKPEDTALYYCAAAYVGAENPLPYSMYGYWGQGTQVTVS

SEQ ID NO: 68 - protein, 124 aa, Artificial Sequence
  Description of Artificial Sequence: Synthetic polypeptide
QVQLVESGGGSVQAGGSLRLSCAASGQISHIKYLGWFRQAPGKEREGVAALITRWGQTYYADSVKGRFTVSLDNAKNTVYLQMNSLKPEDTALYYCAAADYGASDPLWFIHYLYWGQGTQVTVS

SEQ ID NO: 69 - protein, 124 aa, Artificial Sequence
  Description of Artificial Sequence: Synthetic polypeptide
QVQLVESGGGSVQAGGSLRLSCAASGKIWTIKYLGWFRQAPGKEREGVAALMTRWGYTYYADSVKGRFTVSLDNAKNTVYLQMNSLKPEDTALYYCAAANYGSNFPLAEEDYWYWGQGTQVTVS

SEQ ID NO: 70 - protein, 125 aa, Artificial Sequence
  Description of Artificial Sequence: Synthetic polypeptide
QVQLVESGGGSVQAGGSLRLSCAASGNISQIHYLGWFRQAPGKEREGVAALNTDYGYTYYADSVKGRFTVSLDNAKNTVYLQMNSLKPEDTALYYCAAAYYFGDDIPLWWEAYSYWGQGTQVTVS

SEQ ID NO: 71 - protein, 124 aa, Artificial Sequence
  Description of Artificial Sequence: Synthetic polypeptide
QVQLVESGGGSVQAGGSLRLSCAASGNISTIEYLGWFRQAPGKEREGVAALYTWHGQTYYADSVKGRFTVSLDNAKNTVYLQMNSLKPEDTALYYCAAARWGRHMPLSATEYSYWGQGTQVTVS

SEQ ID NO: 72 - protein, 124 aa, Artificial Sequence
  Description of Artificial Sequence: Synthetic polypeptide
QVQLVESGGGSVQAGGSLRLSCAASGNIESIYYLGWFRQAPGKEREGVAALWTGDGETYYADSVKGRFTVSLDNAKNTVYLQMNSLKPEDTALYYCAAAAWGNSAPLTTYRYYYWGQGTQVTVS

SEQ ID NO: 73 - protein, 124 aa, Artificial Sequence
  Description of Artificial Sequence: Synthetic polypeptide
QVQLVESGGGSVQAGGSLRLSCAASGFIYGITYLGWFRQAPGKEREGVAALVTWNGQTYYADSVKGRFTVSLDNAKNTVYLQMNSLKPEDTALYYCAAADWGYDWPLWDEWYWYWGQGTQVTVS

SEQ ID NO: 74 - protein, 124 aa, Artificial Sequence
  Description of Artificial Sequence: Synthetic polypeptide
QVQLVESGGGSVQAGGSLRLSCAASGTIADIKYLGWFRQAPGKEREGVAALMTRWGSTYYADSVKGRFTVSLDNAKNTVYLQMNSLKPEDTALYYCAAANYGANYPLYSQQYSYWGQGTQVTVS

SEQ ID NO: 75 - protein, 124 aa, Artificial Sequence
  Description of Artificial Sequence: Synthetic polypeptide
QVQLVESGGGSVQAGGSLRLSCAASGSISSIKYLGWFRQAPGKEREGVAALMTRWGMTYYADSVKGRFTVSLDNAKNTVYLQMNSLKPEDTALYYCAAANYGANEPLQYTHYNYWGQGTQVTVS

SEQ ID NO: 76 - protein, 124 aa, Artificial Sequence
  Description of Artificial Sequence: Synthetic polypeptide
QVQLVESGGGSVQAGGSLRLSCAASGEIESIFYLGWFRQAPGKEREGVAALYTYVGQTYYADSVKGRFTVSLDNAKNTVYLQMNSLKPEDTALYYCAAASYGAAHPLSIMRYYYWGQGTQVTVS

SEQ ID NO: 77 - protein, 124 aa, Artificial Sequence
  Description of Artificial Sequence: Synthetic polypeptide
QVQLVESGGGSVQAGGSLRLSCAASGTIAHIKYLGWFRQAPGKEREGVAALMTKWGQTYYADSVKGRFTVSLDNAKNTVYLQMNSLKPEDTALYYCAAASYGANFPLKASDYSYWGQGTQVTVS

SEQ ID NO: 78 - protein, 124 aa, Artificial Sequence
  Description of Artificial Sequence: Synthetic polypeptide
QVQLVESGGGSVQAGGSLRLSCAASGSIQAITYLGWFRQAPGKEREGVAALVTWNGQTYYADSVKGRFTVSLDNAKNTVYLQMNSLKPEDTALYYCAAADWGYDWPLWDEWYWYWGQGTQVTVS

SEQ ID NO: 79 - protein, 124 aa, Artificial Sequence
  Description of Artificial Sequence: Synthetic polypeptide
QVQLVESGGGSVQAGGSLRLSCAASGSISSITYLGWFRQAPGKEREGVAALVTYSGNTYYADSVKGRFTVSLDNAKNTVYLQMNSLKPEDTALYYCAAATWGHSWPLYNDEYWYWGQGSQVTVS

SEQ ID NO: 80 - protein, 124 aa, Artificial Sequence
  Description of Artificial Sequence: Synthetic polypeptide
QVQLVESGGGSVQAGGSLRLSCAASGSISSITYLGWFRQAPGKEREGVAALITVNGHTYYADSVKGRFTVSLDNAKNTVYLQMNSLKPEDTALYYCAAAAWGYAWPLHQDDYWYWGQGTQVTVS

SEQ ID NO: 81 - protein, 124 aa, Artificial Sequence
  Description of Artificial Sequence: Synthetic polypeptide
QVQLVESGGGSVQAGGSLRLSCAASGSISSITYLGWFRQAPGKEREGVAALNTFNGTTYYADSVKGRFTVSLDNAKNTVYLQMNSLKPEDTALYYCAAATWGYSWPLIAEYNWYWGQGTQVTVS

SEQ ID NO: 82 - protein, 124 aa, Artificial Sequence
  Description of Artificial Sequence: Synthetic polypeptide
QVQLVESGGGSVQAGGSLRLSCAASGSISSITYLGWFRQAPGKEREGVAALKTQAGFTYYADSVKGRFTVSLDNAKNTVYLQMNSLKPEDTALYYCAAANWGYSWPLYEADDWYWGQGTQVTVS

SEQ ID NO: 83 - protein, 125 aa, Artificial Sequence
  Description of Artificial Sequence: Synthetic polypeptide
QVQLQESGGGLVQAGGSLRLSCAASGRTFSEYAMGWFRQAPGKEREFVATISWSGGSTYYTDSVKGRFTISRDNAKNTVYLQMNSLKPDDTAVYYCAAAGLGTVVSEWDYDYDYWGQGTQVTVSS

SEQ ID NO: 84 - protein, 119 aa, Artificial Sequence
  Description of Artificial Sequence: Synthetic polypeptide
QMQLVQSGTEVKKPGESLKISCKGSGYGFITYWIGWVRQMPGKGLEWMGIIYPGDSETRYSPSFQGQVTISADKSINTAYLQWSSLKASDTAIYYCAGGSGISTPMDVWGQGTTVTVSS

SEQ ID NO: 85 - protein, 113 aa, Artificial Sequence
  Description of Artificial Sequence: Synthetic polypeptide
DIQLTQSPDSLAVSLGERATINCKSSQSVLYSSINKNYLAWYQQKPGQPPKLLIYWASTRESGVPDRFSGSGSGTDFTLTISSLQAEDVAVYYCQQYYSTPYTFGQGTKVEIK

SEQ ID NO: 86 - protein, 130 aa, Artificial Sequence
  Description of Artificial Sequence: Synthetic polypeptide
EVQLVQSGAEVKKPGASVKVSCKASGYTFTSYGISWVRQAPGQGLEWMGWISAYNGNTNYAQKLQGRVTMTTDTSTSTAYMELRSLRSDDTAVYYCAREGYCSGGSCYSGYYYYYGMDVWGQGTTVTVSS

SEQ ID NO: 87 - protein, 106 aa, Artificial Sequence
  Description of Artificial Sequence: Synthetic polypeptide
DIVMTQTPATLSLSPGERATLSCRASQSVSSYLAWYQQKPGQAPRLLIYDASNRATGIPARFSGSGSGTDFTLTISSLEPEDFAVYYCQQRRNWGTFGPGTKVDIK

SEQ ID NO: 88 - protein, 119 aa, Artificial Sequence
  Description of Artificial Sequence: Synthetic polypeptide
EVQLVESGGGLVQPGGSLRLSCAASGFTVSSNYMSWVRQAPGKGLEWVSVIYSGGSTFYADSVKGRFTISRDNSMNTLFLQMNSLRAEDTAVYYCARVLPMYGDYLDYWGQGTLVTVSS

SEQ ID NO: 89 - protein, 109 aa, Artificial Sequence
  Description of Artificial Sequence: Synthetic polypeptide
DIVMTQSPSSLSASVGDRVTITCRASQSISRYLNWYQQKPGKAPKLLIYAASSLQSGVPSRFSGSGSGTDFTLTISSLQPEDFATYYCQQSYSTPPEYTFGQGTKLEIK

SEQ ID NO: 90 - protein, 124 aa, Artificial Sequence
  Description of Artificial Sequence: Synthetic polypeptide
EVQLVESGGGVVQPGRSLRLSCAASGFTFSIYGMHWVRQAPGKGLEWVAVISYDGSNKYYADSVKGRFTISRDNSKNTLYLQMNSLRAEDTAVYYCAKEGRPSDIVVVVAFDYWGQGTLVTVSS

SEQ ID NO: 91 - protein, 107 aa, Artificial Sequence
  Description of Artificial Sequence: Synthetic polypeptide
DIQLTQSPSSLSASVGDRVTITCRASQSISSYLNWYQQKPGKAPKLLIYAASSLQSGVPSRFSGSGSGTDFTLTISSLQPEDFATYYCQQSYSTPRTFGQGTKVEIK

SEQ ID NO: 92 - protein, 117 aa, Artificial Sequence
  Description of Artificial Sequence: Synthetic polypeptide
EVQLVESGGGLIQPGGSLRLSCAASGFTVSSNYMSWVRQAPGKGLEWVSVIYSGGSTYYADSVKGRFTISRDNSKNTLYLQMNSLRAGDTAVYYCARDYGDFYFDYWGQGTLVTVSS

SEQ ID NO: 93 - protein, 108 aa, Artificial Sequence
  Description of Artificial Sequence: Synthetic polypeptide
EIVLTQSPGTLSLSPGERATLSCRASQSVSSTYLAWYQQKPGQAPRLLIYGASSRATGIPDRFSGSGSGTDFTLTISRLEPEDFAVYYCQQYGSSPRTFGQGTKLEIK

SEQ ID NO: 94 - protein, 128 aa, Artificial Sequence
  Description of Artificial Sequence: Synthetic polypeptide
QVQLVQSGAEVKKPGASVKVSCKASGYTFTGYYMHWVRQAPGQGLEWMGWINPISGGTNYAQKFQGRVTMTRDTSISTAYMELSRLRSDDTAVYYCASPASRGYSGYDHGYYYYMDVWGKGTTVTVSS

SEQ ID NO: 95 - protein, 107 aa, Artificial Sequence
  Description of Artificial Sequence: Synthetic polypeptide
AIRMTQSPSSLSASVGDRVTITCQASQDISNYLNWYQQKPGKAPKLLIYDASNLETGVPSRFSGSGSGTDFTFTISSLQPEDIATYYCQQYDNLPITFGQGTRLEIK

SEQ ID NO: 96 - protein, 123 aa, Artificial Sequence
  Description of Artificial Sequence: Synthetic polypeptide
QVQLVQSGPEVKKPGTSVKVSCKASGFTFTSSAVQWVRQARGQRLEWIGWIVVGSGNTNYAQKFQERVTITRDMSTSTAYMELSSLRSEDTAVYYCAAPHCSGGSCLDAFDIWGQGTMVTVSS

SEQ ID NO: 97 - protein, 108 aa, Artificial Sequence
  Description of Artificial Sequence: Synthetic polypeptide
EIVLTQSPGTLSLSPGERATLSCRASQSVRSSYLAWYQQKPGQAPRLLIYGASSRATGIPDRFSGSGSGTDFTLTISRLEPEDFAVYYCQQYGSSPWTFGQGTKVEIK

SEQ ID NO: 98 - protein, 125 aa, Artificial Sequence
  Description of Artificial Sequence: Synthetic polypeptide
QVQLVESGGGLVKPGGSLRLSCAASGFIFSDYCMSWIRRAPGKGLEWLSYISNSGTTRYYADSVKGRFTISRDNGRNSLYLQMDSLSAEDTAVYYCARRGDGSSSIYYYNYMDVWGKGTTVTVSS

SEQ ID NO: 99 - protein, 110 aa, Artificial Sequence
  Description of Artificial Sequence: Synthetic polypeptide
QSVLTQPPSASGTPGQRVTVSCSGSSSNIGSNTVNWYQQLPGTAPKLLIYSNNQRPSGVPDRFSGSKSGTSASLAISGLQSEDEADYFCAAWDDSLNGPVFGGGTKLTVL

SEQ ID NO: 100 - protein, 120 aa, Artificial Sequence
  Description of Artificial Sequence: Synthetic polypeptide
EVQLVESGGGVVQPGRSLRLSCAASGFTFSSYGMHWVRQAPGKGLEWVTVISYDGRNKYYADSVKGRFTISRDNSKNTLYLQMNSLRAEDTAVYYCAREFGDPEWYFDYWGQGTLVTVSS

SEQ ID NO: 101 - protein, 106 aa, Artificial Sequence
  Description of Artificial Sequence: Synthetic polypeptide
DIQMTQSPSTLSASVGDRVTITCRANQSISSWLAWYQQKPGKAPKLLIYKASSLESGVPSRFSGSGSGTEFTLTISSLQPDDFATYYCQQYNSYWTFGQGTKVEIK

SEQ ID NO: 102 - protein, 122 aa, Artificial Sequence
  Description of Artificial Sequence: Synthetic polypeptide
QVQLVQSGAEVKKPGASVKVSCMASGYTFTGYYMHWVRQAPGQGLEWMGWINPNSGGTNYAQKFQGRVTMTRDTSISTAYMELSRLRSDDTAVYYCARDSPFSALGASNDYWGQGTLVTVSS

SEQ ID NO: 103 - protein, 110 aa, Artificial Sequence
  Description of Artificial Sequence: Synthetic polypeptide
QSALTQPPSASGSPGQSVTISCTGTSSDVGGYNYVSWYQQHPGKAPKLMIYEVSKRPSGVPDRFSGSKSGNTASLTVSGLQAEDEAEYYCSSDAGSNNVVFGGGTKLTVL

SEQ ID NO: 104 - protein, 123 aa, Artificial Sequence
  Description of Artificial Sequence: Synthetic polypeptide
EVQLVESGGGVVQPGRSLRLSCAASGFTFSSYAMHWVRQAPAKGLEWVAVILYDGSGKYYADSVKGRFTISRDNSKNTLYLQMNSLRAEDTAVYYCARDGIVDTALVTWFDYWGQGTLVTVSS

SEQ ID NO: 105 - protein, 108 aa, Artificial Sequence
  Description of Artificial Sequence: Synthetic polypeptide
DIQLTQSPSSLSASVGDRVTITCRASQSISTYLNWYQQKPGKAPKLLIYAASSLQSGVPSRFSGSGSGTDFTLTISSLQPEDFATYYCQQSYSTPPWTFGQGTKVEIK

SEQ ID NO: 106 - protein, 138 aa, Artificial Sequence
  Description of Artificial Sequence: Synthetic polypeptide
QVQLVQSGAEVKKPGSSVKVSCKASGGTFSSYAISWVRQAPGQGLEWMGGIIPIFGTANYAQKFQGRVTITADESTSTAYMELSSLRSEDTAVYYCARGNRLLYCSSTSCYLDAVRQGYYYYYYMDVWGKGTTVTVSS

SEQ ID NO: 107 - protein, 107 aa, Artificial Sequence
  Description of Artificial Sequence: Synthetic polypeptide
EIVLTQSPATLSLSPGERATLSCRASQSVSSYLAWYQQKPGQAPRLLIYDASNRATGIPARFSGSGSGTDFTLTISSLEPEDFAVYYCQQRSNWPLTFGGGTKVEIK

SEQ ID NO: 108 - protein, 127 aa, Artificial Sequence
  Description of Artificial Sequence: Synthetic polypeptide
EVQLVESGGGVVQPGRSLRLSCAASGFTFSRYGMHWVRQAPGKGLEWVAVISYDGSNKYYADSVKGRFTISRDNSKNTLYLQMNSLRAEDTAVYYCAKVTAPYCSGGSCYGGNFDYWGQGTLVTVSS

SEQ ID NO: 109 - protein, 107 aa, Artificial Sequence
  Description of Artificial Sequence: Synthetic polypeptide
AIRMTQSPSSLSASVGDRVTITCQASQDISNYLNWYQQKPGKAPKLLIYDASNLETGVPSRFSGSGSGTDFTFTINSLQPEDIATYYCQQYDNLPPTFGGGTKVEIK

SEQ ID NO: 110 - protein, 126 aa, Artificial Sequence
  Description of Artificial Sequence: Synthetic polypeptide
EVQLVESGGGLVQPGRSLRLSCAASGFTFDDYAMHWVRQAPGKGLEWVSGISWNSGTIGYADSVKGRFTISRDNAKNSLYLQMNSLRAEDTAFYYCAKAGVRGIAAAGPDLNFDHWGQGTLVTVSS

SEQ ID NO: 111 - protein, 103 aa, Artificial Sequence
  Description of Artificial Sequence: Synthetic polypeptide
EIVLTQSPATLSLSPGERATLSCRASQSVSSYLAWYQQKPGQAPRLLIYDASNRATGIPARFSGSGSGTDFTLTISSLEPEDFAVYYCQQRITFGQGTRLEIK

SEQ ID NO: 112 - protein, 121 aa, Artificial Sequence
  Description of Artificial Sequence: Synthetic polypeptide
EVQLVESGGGVVQPGRSLRLSCAASGFTFSNYAIHWVRQAPGKGLEWVAVISYDGSNKYYADSVKGRFTISRDNSKNTLYLQMNSLRAEDTAVYYCARDFDDSSFWAFDYWGQGTLVTVSS

SEQ ID NO: 113 - protein, 108 aa, Artificial Sequence
  Description of Artificial Sequence: Synthetic polypeptide
DIQLTQSPSSLSASVGDRVTITCRASQSIRSYLNWYQQKPGKAPKLLIYAASSLQSGVPSRFSGSGSGTDFTLTISSLQPDDFATYYCQQSYSTPPATFGQGTKLEIK

SEQ ID NO: 114 - protein, 120 aa, Artificial Sequence
  Description of Artificial Sequence: Synthetic polypeptide
QVQLVQSGAEVKKPGASVKVSCKASGYTFTSYYMHWVRQAPGQGLEWMGIINPSGGSTSYAQKFQGRVTMTRDTSTSTVYMELSSLRSEDTAVYYCARVPREGTPGFDPWGQGTLVTVSS

SEQ ID NO: 115 - protein, 108 aa, Artificial Sequence
  Description of Artificial Sequence: Synthetic polypeptide
SYELTQPPSVSVAPGKTARITCGENNIGSKSVHWYQQKPGQAPVLVIYYDSDRPSGIPERFSGSNSGNTATLTINRVEAGDEADYYCQVWDSSSDHVVFGGGTKLTVL

SEQ ID NO: 116 - protein, 123 aa, Artificial Sequence
  Description of Artificial Sequence: Synthetic polypeptide
QVQLQESGPGLVKPSQTLSLTCTVSGGSISSGGYYWSWIRQHPGKGLEWIGYIYYSGSTYYNPSLKSRVTISVDTSKNQFSLKLSSVTAADTAVYYCARVWQYYDSSGSFDYWGQGTLVTVSS

SEQ ID NO: 117 - protein, 112 aa, Artificial Sequence
  Description of Artificial Sequence: Synthetic polypeptide
DIVMTQSPLSLPVTPGEPASISCRSSQSLLHSNGYNYLDWYLQKPGQSPQLLIYLGSNRASGVPDRFSGSGSGTDFTLKISRVEAEDVGVYYCMQALQTPFTFGPGTKVDIK

SEQ ID NO: 118 - protein, 129 aa, Artificial Sequence
  Description of Artificial Sequence: Synthetic polypeptide
QVQLQESGPGLVKPSETLSVTCTVSGGSISSSRYYWGWIRQPPGKGLEWIGSIYYSGSTYYNPSLKSRVTISVDTSKNQFSLKLSSVTAADTAVYYCARHAAAYYDRSGYYFIEYFQHWGQGTLVTVSS

SEQ ID NO: 119 - protein, 107 aa, Artificial Sequence
  Description of Artificial Sequence: Synthetic polypeptide
DIQMTQSPSTLSASVGDSVTITCRASQSISSWLAWYQQKPGKAPKLLIYKASSLESGVPSRFSGSGSGTEFTLTISSLQPDDFATYYCQQYNNYRYTFGQGTKLEIK

SEQ ID NO: 120 - protein, 127 aa, Artificial Sequence
  Description of Artificial Sequence: Synthetic polypeptide
EVQLVESGGGVVQPGRSLRLSCAASGFTFSSYGMHWVRQAPGKGLEWVAVISYDGSNKYYADSVKGRFTISRDNSKNTLYLQMNSLRAEDTAVYYCAKASGIYCSGGDCYSYYFDYWGQGTLVTVSS

SEQ ID NO: 121 - protein, 106 aa, Artificial Sequence
  Description of Artificial Sequence: Synthetic polypeptide
DIQMTQSPSTLSASVGDRVTITCRASQSISSWLAWYQQKPGKAPKLLIYKASSLESGVPSRFSGSGSGTEFTLTISSLQPDDFATYYCQQYNSYSTFGQGTKVEIK

SEQ ID NO: 122 - protein, 123 aa, Artificial Sequence
  Description of Artificial Sequence: Synthetic polypeptide
QVQLQESGPGLVKPSQTLSLTCTVSGGSISSGGYYWSWIRQHPGKGLEWIGYIYYSGSTYYNPSLKSRVTISVDTSKNQFSLKLSSVTAADTAVYYCARTMYYYDSSGSFDYWGQGTLVTVSS

SEQ ID NO: 123 - protein, 112 aa, Artificial Sequence
  Description of Artificial Sequence: Synthetic polypeptide
DIVMTQSPLSLPVTPGEPASISCRSSQSLLHSNGYNYLDWYLQKPGQSPQLLIYLGSNRASGVPDRFSGSGSGTDFTLKISRVEAEDVGVYYCMQALQTPHTFGGGTKVEIK

SEQ ID NO: 124 - protein, 127 aa, Artificial Sequence
  Description of Artificial Sequence: Synthetic polypeptide
EVQLVESGGGVVQPGRSLRLSCAASGFTFSSYGMHWVRQAPGKGLEWVAVISYDGSNKYYADSVKGRFTISRDNSKNTLYLQMNSLRAEDTAVYYCAKASGIYCSGGNCYSYYFDYWGQGTLVTVSS

SEQ ID NO: 125 - protein, 106 aa, Artificial Sequence; identical to SEQ ID NO: 121
  Description of Artificial Sequence: Synthetic polypeptide

SEQ ID NO: 126 - protein, 123 aa, Artificial Sequence
  Description of Artificial Sequence: Synthetic polypeptide
EVQLVESGGGLVQPGGSLRLSCAASGFTFSSYDMHWVRQATGKGLEWVSAIGTAGDTYYPGSVKGRFTISRENAKNSLYLQMNSLRAGDTAVYYCARVGYDSSGYSGWYFDLWGRGTLVTVSS

SEQ ID NO: 127 - protein, 108 aa, Artificial Sequence
  Description of Artificial Sequence: Synthetic polypeptide
DIQMTQSPSSLSASVGDRVTITCRASQSISSYLNWYQQKPGKAPKVLIYAASSLQSGVPSRFSGSGSGTDFTLTISSLQPEDFATYYCQQSYSTPPLTFGGGTKVEIK

SEQ ID NO: 128 - protein, 117 aa, Artificial Sequence
  Description of Artificial Sequence: Synthetic polypeptide
QVQLVESGGGLIQPGGSLRLSCAASGFIVSSNYMSWVRQAPGKGLEWVSVIYSGGSTFYTDSVKGRFTISRDNSKNTLYLQMNSLRAEDTAVYYCVRDYGDFYFDYWGQGTLVTVSS

SEQ ID NO: 129 - protein, 108 aa, Artificial Sequence
  Description of Artificial Sequence: Synthetic polypeptide
EIVLTQSPGTLSLSPGERATLSCRASQSVSSSYLAWYQQKPGQAPRLLIYGASSRATGIPDRFSGGGSETDFTLTISRLEPEDCAVYYCQQYGSSPRTFGQGTKVEIK

SEQ ID NO: 130 - protein, 117 aa, Artificial Sequence
  Description of Artificial Sequence: Synthetic polypeptide
QVQLVESGGGLIQPGGSLRLSCAASGFIVSSNYMSWVRQAPGKGLEWVSVIYSGGSTFYADSVKGRFTISRDNSKNTLYLQMNSLRAEDTAVYYCARDYGDYYFDYWGQGTLVTVSS

SEQ ID NO: 131 - protein, 108 aa, Artificial Sequence
  Description of Artificial Sequence: Synthetic polypeptide
EIVLTQSPGTLSLSPGERATLSCRASQSVSSSYLAWYQQKPGQAPRLLIYGASSRATGIPDRFSGSGSGTDFTLTISRLEPEDFAVYYCQQYGSSPRTFGQGTKVEIK

SEQ ID NO: 132 - protein, 123 aa, Artificial Sequence
  Description of Artificial Sequence: Synthetic polypeptide
QVQLQQWGAGLLKPSETLSLTCAVSGGSLSGFYWTWIRQPPGKGLEWIGETNHFGSTGYKPSLKSRVTISVDMSRNQFSLKVTSVTAADTAVYYCARKPLLYSDFSPGAFDIWGQGTMVTVSS

SEQ ID NO: 133 - protein, 108 aa, Artificial Sequence
  Description of Artificial Sequence: Synthetic polypeptide
EIVLTQSPGTLSLSPGERATLSCRASQTVTANYLAWYQQKPGQAPRLLIYGASKRATGIPDRFSGSGSGTDFTLSISRLEPEDFAVYYCQQYTTTPRTFGGGTKVEIK

SEQ ID NO: 134 - protein, 123 aa, Artificial Sequence
  Description of Artificial Sequence: Synthetic polypeptide
QVQLQQWGAGLLKPSETLSLSCAVYGGSLSGYYWSWIRQPPGKGLEWIGEINHFGSTGYNPSLKSRVTISVDTSKSQFSVKLSSVTAADTAVYYCARKPLLYSNLSPGAFDIWGQGTMVTVSS

SEQ ID NO: 135 - protein, 108 aa, Artificial Sequence
  Description of Artificial Sequence: Synthetic polypeptide
EIVLTQSPGTVSLSPGERATLSCWASQSVSASYLAWYQQKPGQAPRLLIYGASSRATGIPDRFSGSGSGTDFTLTISRLEPEDFAVYYCQQYGTTPRTFGGGTKVEIK

SEQ ID NO: 136 - protein, 118 aa, Artificial Sequence
  Description of Artificial Sequence: Synthetic polypeptide
QVQLVESGGGLIQPGGSLRLSCAASGFTVSSNYMSWVRQAPGKGLEWVSVIYSGGSTYYADSVKGRFTISRDNSKNTLYLQMNSLRAEDTAVYYCARGEGWELPYDYWGQGTLVTVSS

SEQ ID NO: 137 - protein, 111 aa, Artificial Sequence
  Description of Artificial Sequence: Synthetic polypeptide
QSALTQPPSASGSPGQSVTISCTGTSSDVGGYKYVSWYQQHPGKAPKLMIYEVSKRPSGVPDRFSGSKSGNTASLTVSGLQAEDEADYYCSSYEGSNNFVVFGGGTKLTVL

SEQ ID NO: 138 - protein, 132 aa, Artificial Sequence
  Description of Artificial Sequence: Synthetic polypeptide
QLQLQESGPGLVKPSETLSLTCTVSGASVSSGSYYWSWIRQPPGKGLEWIGYIYYSGSTNYNPSLKSRVTISVDTSKNQFSLKLSSVTAADTAVYYCARERPGGTYSNTWYTPTDTNWFDTWGQGTLVTVSS

SEQ ID NO: 139 - protein, 108 aa, Artificial Sequence
  Description of Artificial Sequence: Synthetic polypeptide
SYELTQPPSVSVAPGKTARITCGGNNIGSKSVHWYQQKPGQAPVLVIYFDSDRPSGIPERFSGSNSGNTATLTISRVEAGDEADYYCQVWDSSRDHVVFGGGTKLTVL

SEQ ID NO: 140 - protein, 122 aa, Artificial Sequence
  Description of Artificial Sequence: Synthetic polypeptide
QVQLVQSGAEVKKPGASVRVSCKASGYTFTSYGFSWVRQAPGQGLEWMGWISAYNGNTNFAQKLQGRVTMTTDTSTSTAYMELRSLRSDDTAVYYCARGEAVAGTTGFFDYWGQGTLVTVSS

SEQ ID NO: 141 - protein, 111 aa, Artificial Sequence
  Description of Artificial Sequence: Synthetic polypeptide
QSVLTQPPSASGTPGQRVTISCSGSSSNIGSNYVYWYQQLPGTAPKLLIYRNNQRPSGVPDRFSGSKSGTSASLAISGLRSEDEADYYCAAWDDSLSGFVVFGGGTKLTVL

SEQ ID NO: 142 - protein, 120 aa, Artificial Sequence
  Description of Artificial Sequence: Synthetic polypeptide
QVQLQESGPGLVKPSGTLSLTCAVSGGSISSTNWWSWVRQPPGKGLEWIGEIYHTGSTNYNPSLKSRVTISVDKSKNQFSLKLSSVTAADTAVYYCVRDGGRPGDAFDIWGQGTMVTVSS

SEQ ID NO: 143 - protein, 110 aa, Artificial Sequence
  Description of Artificial Sequence: Synthetic polypeptide
QSALTQPASVSGSPGQSITISCTGTSSDVGGYNYVSWYQQHPGKAPKLMIYDVSNRPSGVSNRFSGSKSGNTASLTISGLQAEDEADYYCNSYTSSSTRVFGTGTKVTVL

SEQ ID NO: 144 - protein, 119 aa, Artificial Sequence
  Description of Artificial Sequence: Synthetic polypeptide
EVQLVESGGGLVQPGGSLRLSCAASGFTFSSYWMSWVRQAPGKGLEWVANIKQDGSEKYYVDSVKGRFTISGDNAKNSLYLHMNSLRAEDTAVYYCAIQLWLRGGYDYWGQGTLVTVSS

SEQ ID NO: 145 - protein, 111 aa, Artificial Sequence
  Description of Artificial Sequence: Synthetic polypeptide
QSALTQPPSASGSPGQSVTISCTGTSSDVGGYNYVSWYQQHPGKAPKLMIYEVTKRPSGVPDRFSGSKSGNTASLTVSGLQAEDEADYYCSSYAGSNNYVVFGGGTKLTVL

SEQ ID NO: 146 - protein, 128 aa, Artificial Sequence
  Description of Artificial Sequence: Synthetic polypeptide
QVQLQQSGAEVKKPGESLKISCKGSGYSFTSYWIGWVRQMPGKGLEWMGIIYPGDSDTRYSPSFQGQVTISADKSISTAYMQWSSLKASDTAMYYCARSFRDDPRIAVAGPADAFDIWGQGTMVTVSS

SEQ ID NO: 147 - protein, 107 aa, Artificial Sequence
  Description of Artificial Sequence: Synthetic polypeptide
DIQMTQSPSTLSASVGDRVTITCRASQSISYWLAWYQQKPGKAPKLLIYQASSLESGVPSRFSGSESGTEFTLTISSLQPDDFATYYCQQYNSYPYTFGQGTKLEIK

SEQ ID NO: 148 - protein, 127 aa, Artificial Sequence
  Description of Artificial Sequence: Synthetic polypeptide
QLQLQESGPGLVKPSETLSLTCTVSGGSISSYYWSWIRQPPGKGLEWIGYIYYSGSTNYNPSLKSRVTISVDTSKNQFSLKLSSVTAADTAVYYCARVEDWGYCSSTNCYSGAFDIWGQGTMVTVSS

SEQ ID NO: 149 - protein, 111 aa, Artificial Sequence
  Description of Artificial Sequence: Synthetic polypeptide
QSVLTQPPSVSEAPRQRVTISCSGSSSNIGNNAVNWYQQVPGKAPKLLIYYDDLLPSGVSDRFSGSKSGTSASLAISGLQSEDEADYYCAAWDDSLNGAWVFGGGTKLTVL

SEQ ID NO: 150 - protein, 121 aa, Artificial Sequence
  Description of Artificial Sequence: Synthetic polypeptide
QVQLVESGGGVVQPGRSLRLSCAASGFTFSSHAMHWVRQAPGKGLEWVAVISYDGSNKYYADSVKGRFTISRDNSKNTLYLQMNSLRAEDTAVYYCAREDYYDSSGSFDYWGQGTLVTVSS

SEQ ID NO: 151 - protein, 110 aa, Artificial Sequence
  Description of Artificial Sequence: Synthetic polypeptide
QSALTQPASVSGSPGQSITISCTGTSSDVGGYNYVSWYQQHPGKAPKLMIYDVSNRPSGVSNRFSGSKSGNTASLTISGLQAEDEADYYCSSYTSSSTWVFGGGTKLTVL

SEQ ID NO: 152 - protein, 125 aa, Artificial Sequence
  Description of Artificial Sequence: Synthetic polypeptide
QVQLVESGGGVVQPGRSLRLSCAASGFTFSNFGMHWVRQAPGKGLEWVAVIWYDGSNKYYADSVKGRFTISRDNSKNTLYLQMNSLRAEDTAVYYCARGVNPDDILTGVDAFDIWGQGTMVTVSS

SEQ ID NO: 153 - protein, 107 aa, Artificial Sequence
  Description of Artificial Sequence: Synthetic polypeptide
DIQMTQSPSTLSASVGDRVTITCRASQSMSSWLAWYQQKPGNAPKLLIYKASSLESGVPSRFSGSGSGTEFTLTISSLQPDDFATYYCQQHNSSPLTFGGGTKVEIK

SEQ ID NO: 154 - protein, 117 aa, Artificial Sequence
  Description of Artificial Sequence: Synthetic polypeptide
QVQLVESGGGLIQPGGSLKLSCVVSGFTVSKNYISWVRQAPGKGLEWVSVIFAGGSTFYADSVKGRFAISRDNSNNTLFLQMNSLRVEDTAIYYCARGDGELFFDQWGQGTLVTVSS

SEQ ID NO: 155 - protein, 110 aa, Artificial Sequence
  Description of Artificial Sequence: Synthetic polypeptide
QSVLTQPPSVSGAPGQRVTISCTGTSSNIGAGYDVHWYQQLPGRAPKVLISGNNIRPSEVPDRFSGSRSGTSASLAITSLQPEDEAQYYCQSYDSSLYAVFGGGTKLTVL

SEQ ID NO: 156 - protein, 120 aa, Artificial Sequence
  Description of Artificial Sequence: Synthetic polypeptide
QVQLVESGGGLIKPGRSLRLSCTASGFTFGDYAMTWFRQAPGKGLEWVGFIRSKAYGGTTGYAASVKYRFTISRDDSKSIAYLQMDSLKTEDTAVYYCTRWDGWSQHDYWGQGTLVTVSS

SEQ ID NO: 157 - protein, 112 aa, Artificial Sequence
  Description of Artificial Sequence: Synthetic polypeptide
DIVMTQSPLSLSVTPGEPASISCRSSQSLLHSNGNNYFDWYLQKPGQSPQLLIYLGSNRASGVPDRFSGSGSGTDFTLKISRVEAEDVGVYYCMQVLQIPYTFGQGTKLEIK

SEQ ID NO: 158 - protein, 118 aa, Artificial Sequence
  Description of Artificial Sequence: Synthetic polypeptide
QVQLVESGGGVVQPGRSLRLSCAASGFTYSTYAMHWVRQAPGKGLEWVAFISYDGSNKYYADSVKGRFTISRDNSKNTLYLQMNSLRAEDTAVYYCARDFYHNWFDPWGQGTLVTVSS

SEQ ID NO: 159 - protein, 112 aa, Artificial Sequence
  Description of Artificial Sequence: Synthetic polypeptide
NFMLTQPHSVSESPGKTVTISCTGSSGSIASNYVQWYQQRPGSAPTTVIYEDNQRPSGVPDRFSGSIDRSSNSASLTISGLKTEDEADYYCQSYDSGNHWVVFGGGTRLTVL

SEQ ID NO: 160 - protein, 127 aa, Artificial Sequence
  Description of Artificial Sequence: Synthetic polypeptide
QVQLVESGGGVVQPGRSLRLSCAASGFTFSTYAMHWVRQAPGEGLEWVAVISYDGSNTYYADSVKGRFTISRDNSKNTLYLQMNSLRAEDTAVYYCARDPIWFGELLSPPFVHFDYWGQGTLVTVSS

SEQ ID NO: 161 - protein, 113 aa, Artificial Sequence
  Description of Artificial Sequence: Synthetic polypeptide
QSVLTQPPSVSAAPGQKVTISCSGSSSNIGNNLVSWYQQLPGTAPKLLIYENNKRPSGIPDRFSGSKSGTSATLGITGLQTGDEADYYCGAWDSSLSAGGVYVFGTGTKVTVL

SEQ ID NO: 162 - protein, 127 aa, Artificial Sequence
  Description of Artificial Sequence: Synthetic polypeptide
QVQLVESGGGVVQPGRSLRLSCAASGFTFSNYAMHWVRQAPGKGLEWVAVISYDGSNKYYADSVKGRFTISRDNSKNTLYLQMNSLRAEDTAIYYCASGYTGYDYFVRGDYYGLDVWGQGTTVTVSS

SEQ ID NO: 163 - protein, 111 aa, Artificial Sequence
  Description of Artificial Sequence: Synthetic polypeptide
QPVLTQSPSASASLGASVKLTCTLSSGHSSYAIAWHQQQPEKGPRYLMKLNTDGSHSKGDGIPDRFSGSSSGAERYLTISSLQSEDEADYYCQTWGTGILVFGGGTKLTVL

SEQ ID NO: 164 - protein, 127 aa, Artificial Sequence
  Description of Artificial Sequence: Synthetic polypeptide
QVQLVQSGAEVKKPGASVKVSCKASGYTFTSYYMHWVRQAPGQGLEWMGIINPSGGSTSYAQKLQGRVTMTRDTSTSTVYMELSSLRSEDTAVYYCARANHETTMDTYYYYYYMDVWGKGTTVTVSS

SEQ ID NO: 165 - protein, 111 aa, Artificial Sequence
  Description of Artificial Sequence: Synthetic polypeptide
QSALTQPASVSGSPGQSITISCTGTSSDVGGYKYVSWYQRHPGKAPKLMIYDVSNRPSGVSNRFSGSKSGNTASLTISGLQAEDEADYYCSSYTSSSTSVVFGGGTQLTVL

SEQ ID NO: 166 - protein, 118 aa, Artificial Sequence
  Description of Artificial Sequence: Synthetic polypeptide
EVQLVESGGGLIQPGGSLRLSCAASGFTVSSNYMTWVRQAPGKGLEWVSLIYPGGSTYYADSVKGRFTISRDNSKNTLYLQMNSLRAEDTAVYYCAREGMGMAAAGTWGQGTLVTVSS

SEQ ID NO: 167 - protein, 107 aa, Artificial Sequence
  Description of Artificial Sequence: Synthetic polypeptide
AIRMTQSPSSLSASVGDTVTITCQASQDISKYLNWYQQKPGKAPKLLIYDASNLETGVPSRFSGSGSGTDFTFTISSLQPEDIATYYCQQYDNLPQTFGGGTKVEIK

SEQ ID NO: 168 - protein, 129 aa, Artificial Sequence
  Description of Artificial Sequence: Synthetic polypeptide
QVQLVQSGAEVKKPGASVKVSCKASGYTFTGYYMHWVRQAPGQGLEWMGWISPVSGGTNYAQKFQGRVTMTRDTSISTAYMELSRLRSDDTAVYYCARAPLFPTGVLAGDYYYYGMDVWGQGTTVTVSS

SEQ ID NO: 169 - protein, 110 aa, Artificial Sequence
  Description of Artificial Sequence: Synthetic polypeptide
QSALTQPASVSGSPGQSITISCTGTSSDVGSYNLVSWYQQHPGKAPKLMIYEGSKRPSGVSNRFSGSKSGNTASLTISGLQAEDEADYYCCSYAGSSTLVFGGGTKLTVL

SEQ ID NO: 170 - protein, 119 aa, Artificial Sequence
  Description of Artificial Sequence: Synthetic polypeptide
EVQLVESGGGLIQPGGSLRLSCAASGLTVSSNYMSWVRQAPGKGLEWVSVLYSGGSSFYADSVKGRFTISRDNSKNTLYLQMNSLRAEDTAVYYCARESGDTTMAFDYWGQGTLVTVSS

SEQ ID NO: 171 - protein, 107 aa, Artificial Sequence
  Description of Artificial Sequence: Synthetic polypeptide
DIQLTQSPSFLSASVGDRVTITCRASQGISSYLAWYQQKPGKAPKLLIYAASTLQSGVPSRFSGSGSGTEFTLTISSLQPEDFATYYCQQLNSDSYTFGQGTKLEIK

SEQ ID NO: 172 - protein, 116 aa, Artificial Sequence
  Description of Artificial Sequence: Synthetic polypeptide
EVQLVESGGGLIQPGGSLRLSCAASGVTVSRNYMSWVRQAPGKGLEWVSVIYSGGSTYYADSVKGRFTISRDNSKNTLYLQMNSLRAEDTAVYYCARDLSAAFDIWGQGTMVTVSS

SEQ ID NO: 173 - protein, 107 aa, Artificial Sequence
  Description of Artificial Sequence: Synthetic polypeptide
DIQLTQSPSFLSASVGDRVTITCRASQGISSYLAWYQQKPGKAPKLLIYAASTLQSGVPSRFSGSGSGTEFTLTISSLQPEDFATYYCQQLNSYPPAFGQGTRLEIK

SEQ ID NO: 174 - protein, 125 aa, Artificial Sequence
  Description of Artificial Sequence: Synthetic polypeptide
EVQLVESGGGLVQPGGSLRLSCAASGFTFSGYSMNWVRQAPGKGPEWVSYISRSSSTIYYADSVKGRFTISRDNAKNSLYLQMNSLRDEDTAVYYCAREGARVGATYDTYYFDYWGQGTLVTVSS

SEQ ID NO: 175 - protein, 109 aa, Artificial Sequence
  Description of Artificial Sequence: Synthetic polypeptide
EIVLTQSPATLSLSPGERATLSCRASQSFSSYLAWYQQKPGQAPRLLIYDASNRATGIPARFSGSGSGTDFTLTISSLEPEDFAVYYCQQRNNWPPEWTFGQGTKVEIK

SEQ ID NO: 176 - protein, 123 aa, Artificial Sequence
  Description of Artificial Sequence: Synthetic polypeptide
QVQLVQSGPEVKKPGTSVKVSCKASGFTFTSSAVQWVRQARGQRLEWIGWIVVGSGNTNYAQKFQERVTITRDMSTSTAYMELSSLRSEDTAVYYCAAPYCSGGSCSDAFDIWGQGTMVTVSS

SEQ ID NO: 177 - protein, 108 aa, Artificial Sequence
  Description of Artificial Sequence: Synthetic polypeptide
EIVLTQSPGTLSLSPGERATLSCRASQSVSSSYLAWYQQKPGQAPRLLIYGASSRATGIPDRFSGSGSGTDFTLTISRLEPEDFAVYYCQQYGSSPWTFGQGTKVEIK

SEQ ID NO: 178 - protein, 118 aa, Artificial Sequence
  Description of Artificial Sequence: Synthetic polypeptide
QVQLQESGPGLVKPSETLSLSCAVSGGSIGSYFWSWIRQPPGKGLEWIGYLHYSGSTNYNPSLKSRVTISVDTSKNQFSLKLSSVTAADTAVYYCARLQWLRGAFDIWGQGTMVTVSS

SEQ ID NO: 179 - protein, 110 aa, Artificial Sequence
  Description of Artificial Sequence: Synthetic polypeptide
NFMLTQPHSVSESPGKTVTISCTGSSGSIASNYVQWYQQRPGSAPTTVINEDNQRPSGVPDRFSGSIDSSSNSASLTISGLKTEDEADYYCQSYDSSNLVFGGGTKLTVL

SEQ ID NO: 180 - protein, 125 aa, Artificial Sequence
  Description of Artificial Sequence: Synthetic polypeptide
QVQLVQSGAEVKKPGASVKVSCKASGYTFTGYYMHWVRQAPGQGLEWMGWINPNSGGTNYAQKFQGRVTMTRDTSISTAYMELSRLRSDDTAVYYCATAHPRRIQGVFFLGPGVWGQGTTVTVSS

SEQ ID NO: 181 - protein, 110 aa, Artificial Sequence
  Description of Artificial Sequence: Synthetic polypeptide
QSVLTQPPSASGTPGQRVTISCSGSSSNIGSNTVNWYQQLPGTAPKLLIYSNNQRPSGVPDRFSGSKSGTSASLAISGLQSEDEADYYCAAWDDSLNGVVFGGGTKLTVL

SEQ ID NO: 182 - protein, 125 aa, Artificial Sequence
  Description of Artificial Sequence: Synthetic polypeptide
EVQLLESGGGLVQPGGSLRLSCAASGFTFSTYAMSWVRQAPGKGLEWVSTITGSGRDTYYADSVKGRFTISRDNSKNTLFLQLNSLRAEDAAVYSCANHPLASGDDYYHYYMDVWGKGTTVTVSS

SEQ ID NO: 183 - protein, 109 aa, Artificial Sequence
  Description of Artificial Sequence: Synthetic polypeptide
EIVLTQSPGTLSLSPGERATLSCRASQSVNSRQLAWYQQKPGQAPRLLIYGASSRATGIPERFSGSGSGTDFTLTISRLESEDFAVYHCQQYGSSRALTFGGGTKVEIK

SEQ ID NO: 184 - protein, 120 aa, Artificial Sequence
  Description of Artificial Sequence: Synthetic polypeptide
QVQLVQSGAEVKKPGASVKVSCKASGYTFTNYYMHWVRQAPGQGLEWMGIINPSGGSTGYAQKFQGRVTMTRDTSTSTVYMELSSLRSEDTAVYYCARSRPTPDWYFDLWGRGTLVTVSS

SEQ ID NO: 185 - protein, 110 aa, Artificial Sequence
  Description of Artificial Sequence: Synthetic polypeptide
SYELTQPPSVSVAPGKTARITCGGNNIGSKSVHWYQQKPGQAPVLVIYYDSDRPSGIPERFSGSNSGNTATLTISRVEAGDEADYYCQVWDSSSDHPGVVFGGGTKLTVL

SEQ ID NO: 186 - protein, 122 aa, Artificial Sequence
  Description of Artificial Sequence: Synthetic polypeptide
QVQLVQSGSEVKKPGSSVKVSCKASGGTFSSYAFSWVRQAPGQGLEWMGRIIPILALANYAQKFQGRVTITADKSTSTAYMELSSLRSEDTAVYYCARVNQAVTTPFSMDVWGQGTTVTVSS

SEQ ID NO: 187 - protein, 107 aa, Artificial Sequence
  Description of Artificial Sequence: Synthetic polypeptide
EIVMTQSPATLSVSPGERATLSCRASQSVSSNLAWYQQKPGQAPRLLIYGASTRATGIPARFSGSGSGTEFTLTISSLQSEDFAVYYCQQYNNWPITFGQGTRLEIK

SEQ ID NO: 188 - protein, 122 aa, Artificial Sequence
  Description of Artificial Sequence: Synthetic polypeptide
QVQLQESGPGLVKPSGTLSLTCAVSGGSISSNNWWSCVRQPPGKGLEWIGEIYHSGSTNYNPSLKSRVTISVDKSKNQFSLKLSSVTAADTAVYYCARGGDTAMGPEYFDYWGQGTLVTVSS

SEQ ID NO: 189 - protein, 110 aa, Artificial Sequence
  Description of Artificial Sequence: Synthetic polypeptide
QSALTQPASVSGSPGQSITISCTGTSSDVGGYNYVSWYQQHPGKAPKLMIYDVSNRPSGVSNRFSGSKSGNTASLTISGLQAEDEADYYCSSYTSSSTLLFGGGTKLTVL

SEQ ID NO: 190 - protein, 123 aa, Artificial Sequence
  Description of Artificial Sequence: Synthetic polypeptide
QVQLVESGGGVVQPGRSLRLSCAASGFTFSSYAMHWVRQAPGKGLEWVAVILYDGSNKYYADSVKGRFTISRDNSKNTLYLQMNSLRAEDTAVYYCARDSDVDTSMVTWFDYWGQGTLVTVSS

SEQ ID NO: 191 - protein, 108 aa, Artificial Sequence
  Description of Artificial Sequence: Synthetic polypeptide
DIQMTQSPSSLSASVGDRVTITCRASQSISSYLNWYQQKPGKAPKLLIYAASSLQSGVPSRFSGSGSGTDFTLTISSLQPEDFATYYCQQSYSTPPWTFGQGTKVEIK

SEQ ID NO: 192 - protein, 123 aa, Artificial Sequence
  Description of Artificial Sequence: Synthetic polypeptide
EVQLLESGGGLVQPGGSLRLSCAASGFTFSNYAMSWVRQAPGKGLEWVSAISGSDGSTYYAGSVKGRFTISRDNSKNTLYLQMNSLRAEDTAVYYCAKDPLITGPTYQYFHYWGQGTLVTVSS

SEQ ID NO: 193 - protein, 110 aa, Artificial Sequence
  Description of Artificial Sequence: Synthetic polypeptide
SYELTQPPSVSVAPGKTARITCGGNNIGSKSVHWYQQKPGQAPVLVIYYDSDRPSGIPERFSGSNSGNTATLTISRVEAGDEAEYHCQVWDSSSDRPGVVFGGGTKLTVL

SEQ ID NO: 194 - protein, 119 aa, Artificial Sequence
  Description of Artificial Sequence: Synthetic polypeptide
QVQLVESGGGVVQPGRSLRLSCAASGFTFSSYAMHWVRQAPGKGLEWVAVIPFDGRNKYYADSVTGRFTISRDNSKNTLYLQMNSLRAEDTAVYYCASSSGYLFHSDYWGQGTLVTVSS

SEQ ID NO: 195 - protein, 107 aa, Artificial Sequence
  Description of Artificial Sequence: Synthetic polypeptide
DIQMTQSPSTLSASVGDRVTITCRASQSISNWLAWFQQKPGKAPKLLIYEASSLESGVPSRFSGSGSGTEFTLTISSLQPDDFATYYCQQYNSYPWTFGQGTKVEIK

SEQ ID NO: 196 - protein, 119 aa, Artificial Sequence
  Description of Artificial Sequence: Synthetic polypeptide
EVQLVESGGGLVQPGGSLRLSCAASGFTFSTYWMSWVRQPPGKGLEWVANIKQDGSEKYYVDSVKGRFTISRDNAKNSLYLQMNSLRADDTAVYYCAGGTWLRSSFDYWGQGTLVTVSS

SEQ ID NO: 197 - protein, 110 aa, Artificial Sequence
  Description of Artificial Sequence: Synthetic polypeptide
NFMLTQPHSVSESPGKTVTISCTGSSGSIASNYVQWYQQRPGSAPTTVIYEDNQRPSGVPDRFSGSIDSSSNSASLTISGLKTEDEADYYCQSYDSSNWVFGGGTKLTVL

SEQ ID NO: 198 - protein, 121 aa, Artificial Sequence
  Description of Artificial Sequence: Synthetic polypeptide
EVQLVESGGGVVQPGRSLRLSCAASGFTFSSYAMHWVRQAPGKGLEWVAVISYDGSNKYSADSVKGRFTISRDNSKNTLYLQMNSLRAEDTAVYYCAKGGAYSYYYYMDVWGKGTTVTVSS

SEQ ID NO: 199 - protein, 107 aa, Artificial Sequence
  Description of Artificial Sequence: Synthetic polypeptide
DIQMTQSPSSLSASVGDRVTITCQASQDISNYLNWYQQKPGKAPKLLIYDASNLETGVPSRFSGSGSGTDFTFTISSLQPEDIATYYCQQYDNLPLTFGGGTKVEIK

SEQ ID NO: 200 - protein, 117 aa, Artificial Sequence
  Description of Artificial Sequence: Synthetic polypeptide
EVQLVESGGGLVQPGGSLRLSCAASGVTVSSNYMSWVRQAPGKGLEWVSLIYSGGSTFYADSVKGRFTISRDNSENTLYLQMNTLRAEDTAVYYCARDLYYYGMDVWGQGTTVTVSS

SEQ ID NO: 201 - protein, 107 aa, Artificial Sequence
  Description of Artificial Sequence: Synthetic polypeptide
DIQLTQSPSFLSASVGDRVTITCRASQGISSYLAWYQQKPGKAPKLLIYAASTLQSGVPSRFSGSGSGTEFTLTISSLQPEDFATYYCQQLNSYSYTFGQGTKLEIK

SEQ ID NO: 202 - protein, 124 aa, Artificial Sequence
  Description of Artificial Sequence: Synthetic polypeptide
EVQLVESGGGVVQPGRSLRLSCAASGFTFSSYAMFWVRQAPGKGLEWVAVISYDGSNKYYADSVKGRFTISRDNSKNTLYLQMNSLRAEDTAVYYCARADLGYCTNGVCYVDYWGQGTLVTVSS

SEQ ID NO: 203 - protein, 110 aa, Artificial Sequence; identical to SEQ ID NO: 197
  Description of Artificial Sequence: Synthetic polypeptide

SEQ ID NO: 204 - protein, 129 aa, Artificial Sequence [sequence omitted]

SEQ ID NO: 205 - protein, 110 aa, Artificial Sequence
  Description of Artificial Sequence: Synthetic polypeptide
QSALTQPASVSGSPGQSITISCTGTSNDVGSYTLVSWYQQYPGKAPKLLIFEGTKRSSGISNRFSGSKSGNTASLTISGLQGEDEADYYCCSYAGASTFVFGGGTKLTVL

SEQ ID NO: 206 - protein, 131 aa, Artificial Sequence
  Description of Artificial Sequence: Synthetic polypeptide
EVQLVESGGGLIQPGGSLRLSCAASGFTVSNNYMSWVRQAPGKGLEWVSVIYSGGSTYYADSVKGRFTISRDKSKNTLYLQMNRLRAEDTAVYYCAREGEVEGYNDFWSGYSRDRYYFDYWGQGTLVTVSS

SEQ ID NO: 207 - protein, 110 aa, Artificial Sequence
  Description of Artificial Sequence: Synthetic polypeptide
QSALTQPASVSGSPGQSITISCTGTSSDVGGYNYVSWYQQHPGKAPKLMIYDVSNRPSGVSNRFSGSKSGNTASLTISGLQAEDEADYYCSSYTSSSTRVFGTGTKVTVL

SEQ ID NO: 208 - protein, 131 aa, Artificial Sequence
  Description of Artificial Sequence: Synthetic polypeptide
EVQLVESGGGLIQPGGSLRLSCAASGFSVSSNYMSWVRQAPGKGLEWVSVIYSGGSTYYADSVKGRFTISRDNSKNTLYLQMNSLRAEDTAVYYCAREGEVEGYYDFWSGYSRDRYYFDYWGQGTLVTVSS

SEQ ID NO: 209 - protein, 110 aa, Artificial Sequence
  Description of Artificial Sequence: Synthetic polypeptide
QSALTQPASVSGSPGQSITISCTGTSSDVGGYNYVSWYQQHPGKAPKLMIYDVSNRPSGVSNRFSGSKSGNTASLTISGLQAEDEADYYCSSYTSSTTRVFGTGTRVTVL

SEQ ID NO: 210 - protein, 120 aa, Artificial Sequence
  Description of Artificial Sequence: Synthetic polypeptide
EVQLVESGGGLVKPGGSLRLSCAASGLTFTAYRMNWVRQAPGKGLEWLSSISNTNGDIYYADSVKGRFTISRDNAKNSLYLQMNSLRADDTAVYYCARDVASNYAYFDLWGQGTLVTVSS

SEQ ID NO: 211 - protein, 111 aa, Artificial Sequence
  Description of Artificial Sequence: Synthetic polypeptide
QSALTQPASVSGSPGQSITISCTGTSSDIGVYNYISWSQQHPGKAPKVMIYDVTNRPSGVSNRFSGSKSGNTASLTISGLQAEDEADYYCSSYRGSSTPYVFGTGTKVTVL

SEQ ID NO: 212 - protein, 120 aa, Artificial Sequence
  Description of Artificial Sequence: Synthetic polypeptide
EVQLVQSGAEVKKPGESLKISCKGSGYRFTNYWIGWVRQMPGKGLEWMGIIYPGDSDTRYSPSFQGQVTISADKSITTAYLQWSSLKASDTAMYYCARLSDRWYSPFDPWGQGTLVTVSS

SEQ ID NO: 213 - protein, 110 aa, Artificial Sequence
  Description of Artificial Sequence: Synthetic polypeptide
QAVVTQEPSLTVSPGGTVTLTCGSSTGAVTSGHYPYWFQQKSGQAPRTLIYETSIKHSWTPARFSGSLLGGKAALTLSGAQPEDEADYYCLLSYSGARPVFGGGTKLTVL

SEQ ID NO: 214 - protein, 115 aa, Artificial Sequence
  Description of Artificial Sequence: Synthetic polypeptide
EVQLVESGGGLVQPGGSQRLSCAASGFTVSSNYMSWIRQAPGKGLEWVSVIYSGGSAYYVDSVKGRFTISRDNSKNTLYLQMNSLRPEDTAVYYCARIANYMDVWGKGTTVTVSS

SEQ ID NO: 215 - protein, 108 aa, Artificial Sequence
  Description of Artificial Sequence: Synthetic polypeptide
EIVMTQSPATLSVSPGERATLSCRASQSVSSHLAWYQQKPGQAPRLLIYGASTRATGIPTRFSGSGSGTEFTLTISSLQSEDFAVYYCQQYNNWPPLTFGGGTKVEIK

SEQ ID NO: 216 - protein, 127 aa, Artificial Sequence
  Description of Artificial Sequence: Synthetic polypeptide
EVQLVESGGGLVQPGGSLRLSCVASGFTFSSYWMHWVRQVPGKGPVWVSHINSEGSSTNYADSVRGRFTISRDNAKDTLYLQMNNLRAEDTAVYYCARPTAVAAAGNYFYYYGMDVWGQGTTVTVSS

SEQ ID NO: 217 - protein, 110 aa, Artificial Sequence
  Description of Artificial Sequence: Synthetic polypeptide
QSALTQPASVSGSPGQSITISCTGTSSDVGYYNFVSWYQQHPGKAPKLMIYEVSNRPSGVSNRFSGSKSGNTASLIISGLQAEDEADYYCSSYRSSSTLVFGGGTKLTVL

SEQ ID NO: 218 - protein, 122 aa, Artificial Sequence
  Description of Artificial Sequence: Synthetic polypeptide
EVQLVESGGGLVKPGGSLRLSCAASGFTFSSYNMNWVRQAPGKGLEWVSCISSSSSYIYYADSVKGRFTISRDNAKNSLYLQMNSLRAEDTAVYYCARERGYDGGKTPPFLGGQGTLVTVSS

SEQ ID NO: 219 - protein, 111 aa, Artificial Sequence
  Description of Artificial Sequence: Synthetic polypeptide
NFMLTQPHSVSESPGKTVTISCTGSSGSIASNYVQWYQQRPGSAPTTVIYEDNQRPSGVPDRFSGSIDSSSNSASLTISGLKTEDEADYYCQSYDSSNYWVFGGGTKLTVL

SEQ ID NO: 220 - protein, 122 aa, Artificial Sequence
  Description of Artificial Sequence: Synthetic polypeptide
EVQLVESGGGLIQPGGSLRLSCAASGFTVSSNYMSWVRQAPGKGLEWVSVIYSGYSTYYVDSVKGRFTISRDNSKNTLYLQMNSLRAEDTAVYYCARVGGAHSGYDGSFDYWGQGTLVTVSS

SEQ ID NO: 221 - protein, 110 aa, Artificial Sequence
  Description of Artificial Sequence: Synthetic polypeptide
QSALTQPASVSGSPGQSITISCTGTSSDVGSYNLVSWYQQHPGKAPKLMIYEGSKRPSGVSNRFSGSKSGNTASLTISGLQAEDEADYYCCSYAGSSTWVFGGGTKLTVL

SEQ ID NO: 222 - protein, 127 aa, Artificial Sequence
  Description of Artificial Sequence: Synthetic polypeptide
QVQLVESGGGVVQPGRSLRLSCAASGFTFSRYGMHWVRQAPGKGLEWVAVMSYDGSSKYYADSVKGRFTISRDNSKNTLCLQMNSLRAEDTAVYYCAKQAGPYCSGGSCYSAPFDYWGQGTLVTVSS

SEQ ID NO: 223 - protein, 107 aa, Artificial Sequence
  Description of Artificial Sequence: Synthetic polypeptide
DIQMTQSPSSLSASVGDRVTITCQASQGISNYLNWYQQKPGKAPKLLIYDASNLETGVPSRFSGSGSGTDFTFTISSLQPEDIATYYCQQYDNLPITFGQGTRLEIK

SEQ ID NO: 224 - protein, 117 aa, Artificial Sequence
  Description of Artificial Sequence: Synthetic polypeptide
EVQLVESGGGLIQPGGSLRLSCAASGFIVSSNYMSWVRQAPGKGLEWVSVIYSGGSTFYADSVKGRFTISRDNSKNTLYLQMNSLRAEDTAVYYCARDFGEFYFDYWGQGTLVTVSS

SEQ ID NO: 225 - protein, 107 aa, Artificial Sequence
  Description of Artificial Sequence: Synthetic polypeptide
EIVMTQSPATLSVSPGERATLSCRASQSVSSNLAWYQQKPGQAPRLLIYGASTRATAIPARFSGSGSGTEFTLTISSLQSEDFAVYYCQQYNNWPRTFGQGTKVEIK

SEQ ID NO: 226 - protein, 124 aa, Artificial Sequence
  Description of Artificial Sequence: Synthetic polypeptide
QVQLVESGGGVVQPGRSLRLSCAASGFTFSNYGMHWVRQAPGKGLEWVAVISYDGNNKYYADSVKGRFTISRDNSKNTLYLQMNSLRAEDTAVYYCAKDPFPLAVAGTGYFDYWGQGTLVTVSS

SEQ ID NO: 227 - protein, 108 aa, Artificial Sequence
  Description of Artificial Sequence: Synthetic polypeptide
SYELTQPPSVSVAPGQTARISCGGNNIGSKNVHWYQQKPGQAPVLVVYDDSDRPSGIPERFSGSNSGNTATLTISRVEAGDEADYYCQVWDSSSDPWVFGGGTKLTVL

SEQ ID NO: 228 - protein, 129 aa, Artificial Sequence [sequence omitted]

SEQ ID NO: 229 - protein, 110 aa, Artificial Sequence
  Description of Artificial Sequence: Synthetic polypeptide
QSALTQPASVSGSPGQSITISCTGTSNDVGSYTLVSWYQQYPGKAPKLLIFEVTKRSSGISNRFSGSKSGNTASLTISGLQGEDEADYYCCSYAGASTFVFGGGTKLTVL

SEQ ID NO: 230 - protein, 122 aa, Artificial Sequence
  Description of Artificial Sequence: Synthetic polypeptide
QVQLVQSGAEVKKPGSSVKVSCKASGGTFSSYAINWVRQAPGQGLEWMGRIIPIVGIANYAQKFQGRVTITADKSSSTAYMELSSLRSEDTAVYYCARDLLDPQLDDAFDIWGQGTMVTVSS

SEQ ID NO: 231 - protein, 108 aa, Artificial Sequence
  Description of Artificial Sequence: Synthetic polypeptide
EIVLTQSPGTLSLSPGERATLSCRASQSVSSTYLAWYQQKPGQAPRLLIYGASSRATGIPDRFSGSGSGTDFTLTISRLEPEDFAVYYCQQYGSSPWTFGQGTKVEIK

SEQ ID NO: 232 - protein, 121 aa, Artificial Sequence
  Description of Artificial Sequence: Synthetic polypeptide
EVQLVESGGGLVQPGRSLRLSCAASGFTFDDYAMHWVRQAPGKGLEWVSGISWNSGSIGYADSVKGRFTISRDNAKNSLYLQMNSLRAEDTALYYCVKGVEYSSSSNFDYWGQGTLVTVSS

SEQ ID NO: 233 - protein, 106 aa, Artificial Sequence
  Description of Artificial Sequence: Synthetic polypeptide
IRMTQSPSSVSASVGDRVTITCRASQGISSWLAWYQQKPGKAPKLLIYVESSLQSGVPSRFSGSGSGTDFTLTISSLQPEDFATYYCQQANSFPLTFGGGTKVEIK

SEQ ID NO: 234 - protein, 117 aa, Artificial Sequence
  Description of Artificial Sequence: Synthetic polypeptide
EVQLVESGGGLVQPGGSLRLSCAASGFTVSSNYMSWVRQAPGKGLEWVSLIYSGGSTYYADSVKGRFTISRDNSKNTLYLQMNSLRAEDTAVYYCARDTLGRGGDYWGQGTLVTVSS

SEQ ID NO: 235 - protein, 107 aa, Artificial Sequence
  Description of Artificial Sequence: Synthetic polypeptide
DIQLTQSPSSLSASVGDRVTITCQASQDISNYLNWYQQKPGKAPKLLIYDASNLETGVPSRFSGSGSGTDFTFTISSLQPEDIATYYCQQYDNLPRSFGQGTKLEIK

SEQ ID NO: 236 - protein, 126 aa, Artificial Sequence
  Description of Artificial Sequence: Synthetic polypeptide
EVQLLESGGGLEQPGGSLRLSCAASGFTFSTYAMSWVRQAPGKGLEWVSAISGSGAGTFYADSVKGRFTISRDNSKNTLYLQMNSLRAEDTAVYYCARESDCGSTSCYQVGWFDPWGQGTLVTVSS

SEQ ID NO: 237 - protein, 108 aa, Artificial Sequence
  Description of Artificial Sequence: Synthetic polypeptide
DIQLTQSPSSLSASVGDRVTITCRASQSISSYLNWYQQKPGKAPKLLIYAASSLQSGVPSRFSGSGSGTDFTLTISSLQPEDFATYYCQQSYSTPPWTFGQGTKVEIK

SEQ ID NO: 238 - protein, 124 aa, Artificial Sequence
  Description of Artificial Sequence: Synthetic polypeptide
QVQLVQSGAEVKKPGASVKVSCKASGHTFTSYYMHWVRQAPGQGLEWMGIINPSGGSTSYAQKFQGRVTMTRDTSTSTVYMELSSLRSEDTAVYYCARGPERGIVGATDYFDYWGQGTLVTVSS

SEQ ID NO: 239 - protein, 108 aa, Artificial Sequence
  Description of Artificial Sequence: Synthetic polypeptide
EIVLTQSPGTLSLSPGERATLSCRASQSVSSSYLAWYQQKPGQAPRLLIYGASSRATGIPDRFSGSGSGTDFTLTISRLEPEDFAVYYCQQYVSSPWTFGQGTKVEIK

SEQ ID NO: 240 - protein, 121 aa, Artificial Sequence
  Description of Artificial Sequence: Synthetic polypeptide
EVQLLESGGGLVQPGGSLRLSCAASGFTFSSYAMSWVRQAPGKGLEWVSAISGSGGSTYYADSVKGRFTISRDNSKNTLYLQMNSLRAEDTAVYYCAKEPIGQPLLWWDYWGQGTLVTVSS

SEQ ID NO: 241 - protein, 107 aa, Artificial Sequence
  Description of Artificial Sequence: Synthetic polypeptide
EIVLTQSPATLSLSPGERATLSCRASQSVSSYLAWYQQKPGQAPRLLIYDASNRATGIPARFSGSGSGTDFTLTISSLEPEDFAVYYCQQRSNWPRGFGQGTKVEIK

SEQ ID NO: 242 - protein, 119 aa, Artificial Sequence
  Description of Artificial Sequence: Synthetic polypeptide
EVQLVQSGAEVKKPGESLKISCKGSGYSFTSYWIGWVRQMPGKGLEWMGIIYPGDSDTRYSPSFQGQVTISADKSISTAYLKWSSLKASDSAMYYCARGPNLQNWFDPWGQGTLVTVSS

SEQ ID NO: 243 - protein, 107 aa, Artificial Sequence
  Description of Artificial Sequence: Synthetic polypeptide
EIVLTQSPGTLSLSPGERATLSCRASQSVSGSYLAWYQQRPGQAPRLLIYGASSRATGIPDRFSGSGSGTDFTLTISRLEPEDFAVYYCQQYGSSLTFGGGTKVEIK

SEQ ID NO: 244 - protein, 117 aa, Artificial Sequence
  Description of Artificial Sequence: Synthetic polypeptide
EVQLVESGGGLIQPGGSLRLSCAASGFTVSSNYMSWVRQAPGKGLEWVSVIYSGGSTFYADSVKGRFTFSRDNSKNTLYLQMNSLRAEDTAVYYCARDLMAYGMDVWGQGTTVTVSS

SEQ ID NO: 245 - protein, 108 aa, Artificial Sequence
  Description of Artificial Sequence: Synthetic polypeptide
DIQLTQSPSFLSASVGDRVTITCRASQGISSYLAWYQQKPGKAPKLLIYAASTLQSGVPSRFSGSGSGTEFTLTISSLQPEDFATYYCQQLNSYPQGTFGGGTKVEIK

SEQ ID NO: 246 - protein, 117 aa, Artificial Sequence
  Description of Artificial Sequence: Synthetic polypeptide
EVQLVESGGGLVQPGGSLRLSCAASEFTVSSNYMSWVRQAPGKGLEWVSVIYSGGSTFYADSVKGRFTISRDNSKNTLYLQMNSLRPEDTAVYYCARDYGDFYFDFWGQGTLVTVSS

SEQ ID NO: 247 - protein, 107 aa, Artificial Sequence
  Description of Artificial Sequence: Synthetic polypeptide
EIVMTQSPATLSVSPGERATLSCRASQSVSSNLAWYQQKPGQGPRLLIYGASTRATGIPARFSGSGSGTEFTLTISSLQSEDFAVYYCQQYNNWPRTFGQGTKVEIK

SEQ ID NO: 248 - protein, 120 aa, Artificial Sequence
  Description of Artificial Sequence: Synthetic polypeptide
QVQLVQSGAEVKKPGASVKVSCKASGYTVTGYYIHWVRQAPGQGLEWMGWISPNSGGTNYAQKFQGWVTMTRDMSITTAYMELSRLRSDDTAVYYCARERYFDLGGMDVWGQGTTVTVSS

SEQ ID NO: 249 - protein, 107 aa, Artificial Sequence
  Description of Artificial Sequence: Synthetic polypeptide
LTQPASVSGSPGQSITISCTGTSSDVGSYNLVSWYQQHPGKAPKLMIYEDSKRPSGVSNRFSGSKSGNTASLTISGLQAEDEADYYCCSYAGSSTRLFGGGTKLTVL

SEQ ID NO: 250 - protein, 120 aa, Artificial Sequence
  Description of Artificial Sequence: Synthetic polypeptide
QVQLVESGGGVVQPGRSLRLSCAASGFTFSSYGMHWVRQAPGKGLEWVAAIWYDGSNKHYADSVKGRFTISRDNSKNTLYLQMNSLRAEDTAVYYCARDVGRVTTWFDPWGQGTLVTVSS

SEQ ID NO: 251 - protein, 108 aa, Artificial Sequence
  Description of Artificial Sequence: Synthetic polypeptide
DIQLTQSPSSLSASVGDRVTITCRASQSISSYLTWYQQKPGKAPKLLIYAASSLQSGVPSRFSGSGSGTDFTLTISSLQPEDFATYYCQQSYSTPPWTFGQGTKVEIK

SEQ ID NO: 252 - protein, 122 aa, Artificial Sequence
  Description of Artificial Sequence: Synthetic polypeptide
EVQLLESGGGLVQPGGSLRLSCAASGFTFSSYAMSWVRQAPGKGLEWVSAITDSGDGTFYADSVKGRFTISRDNSKNTLYLQMNSLRAEDTAVYYCASEEDYSNYVGWFDPWGQGTLVTVSS

SEQ ID NO: 253 - protein, 108 aa, Artificial Sequence; identical to SEQ ID NO: 237
  Description of Artificial Sequence: Synthetic polypeptide

SEQ ID NO: 254 - protein, 122 aa, Artificial Sequence
  Description of Artificial Sequence: Synthetic polypeptide
EVQLVESGGGLVQPGGSLRLSCAASGFTFSSYDMHWVRQATGKGLEWVSAIGTAGDTYYPDSVKGRFTISRENAKNSLYLQMNSLRAGDTAVYYCARDRGSSGWYGWYFDLWGRGTLVTVSS

SEQ ID NO: 255 - protein, 108 aa, Artificial Sequence
  Description of Artificial Sequence: Synthetic polypeptide
DIQLTQSPSSLSASVGDRVTITCRASQSISSYLNWYQQKPGKAPKLLIYVASSLQSGVPSRFSGSGSGTDFTLTISSLQPEDFATYYCQQSYSTPPITFGQGTRLEIK

SEQ ID NO: 256 - protein, 115 aa, Artificial Sequence
  Description of Artificial Sequence: Synthetic polypeptide
EVQLVESGGGLVQPGGSLRLSCAASGFIVSSNYMSWVRQAPGKGLEWVSVIYSGGSTYYADSVKGRFTISRHNSKNTLYLQMNSLRAEDTAVYYCAREAYGMDVWGQGTTVTVSS

SEQ ID NO: 257 - protein, 108 aa, Artificial Sequence
  Description of Artificial Sequence: Synthetic polypeptide
DIVMTQSPSFLSASVGDRVTITCRASQGISSYLAWYQQKPGKAPKLLIYAASTLQSGVPSRFSGSGSGTEFTLTISSLQPEDFATYYCQQLNSYPPYTFGQGTKLEIK

SEQ ID NO: 258 - protein, 126 aa, Artificial Sequence
  Description of Artificial Sequence: Synthetic polypeptide
QVQLVQSGAEVKKPGASVKVSCKASGYTFTGYYMHWVRQAPGQGLEWMGRINPNSGGTNYAQKFQGRVTMTRDTSISTAYMELSRLRSDDTAVYYCARVPYCSSTSCHRDWYFDLWGRGTLVTVSS

SEQ ID NO: 259 - protein, 113 aa, Artificial Sequence
  Description of Artificial Sequence: Synthetic polypeptide
DIQMTQSPLSLPVTPGEPASISCRSSQSLLDSDDGNTYLDWYLQKPGQSPQLLIYTLSYRASGVPDRFSGSGSGTDFTLKISRVEAEDVGVYYCMQRIEFPLTFGGGTKVEIK

SEQ ID NO: 260 - protein, 127 aa, Artificial Sequence [sequence omitted]

SEQ ID NO: 261 - protein, 107 aa, Artificial Sequence [sequence omitted]

SEQ ID NO: 262 - protein, 120 aa, Artificial Sequence
  Description of Artificial Sequence: Synthetic polypeptide
EVQLVESGGGLVQPGGSLRLSCAASGFTFSDHYMDWVRQAPGKGLEWVGRTRNKANSYTTEYAASVKGRFTISRDDSKNSLYLQMNSLKTEDTAVYYCARGISPFYFDYWGQGTLVTVSS

SEQ ID NO: 263 - protein, 107 aa, Artificial Sequence
  Description of Artificial Sequence: Synthetic polypeptide
DIQMTQSPSSLSASVGDRVTITCRASQSISSYLNWYQQKPGKAPKLLIYAASSLQSGVPSRFSGSGSGTDFTLTISSLQPEDFATYYCQQSYSTPPTFGQGTKVEIK

SEQ ID NO: 264 - protein, 120 aa, Artificial Sequence
  Description of Artificial Sequence: Synthetic polypeptide
QVQLVESGGGLVKPGGSLRLSCAASGFTFSDYYMSWIRQAPGKGLEWVSYITYSGSTIYYADSVKGRFTISRDNAKSSLYLQMNSLRAEDTAVYYCARDRGTTMVPFDYWGQGTLVTVSS

SEQ ID NO: 265 - protein, 107 aa, Artificial Sequence
  Description of Artificial Sequence: Synthetic polypeptide
DIQMTQSPSSLSASVGDRVTITCQASQDITNYLNWYQQKPGKAPKLLIYAASNLETGVPSRFSGSGSGTDFTFTISGLQPEDIATYYCQQYDNLPLTFGGGTKVEIK

SEQ ID NO: 266 - protein, 120 aa, Artificial Sequence
  Description of Artificial Sequence: Synthetic polypeptide
QVQLVESGGGVVQPGRSLRLSCAASGFTFSNYAMYWVRQAPGKGLEWVAVISYDGSNKYYADSVKGRFTISRDNSKNTLYLQMNSLRTEDTAVYYCASGSDYGDYLLVYWGQGTLVTVSS

SEQ ID NO: 267 - protein, 110 aa, Artificial Sequence
  Description of Artificial Sequence: Synthetic polypeptide
QSALTQPASVSGSPGQSITISCTGTSSDVGGYNYVSWYQQHPGKAPKLMIYDVSKRPSGVSNRFSGSKSGNTASLTISGLQSEDEADYYCNSLTSISTWVFGGGTKLTVL

SEQ ID NO: 268 - protein, 125 aa, Artificial Sequence
  Description of Artificial Sequence: Synthetic polypeptide
QVQLVQSGAEVKKPGSSVKVSCKASGGTFSNYAISWVRQAPGQGLEWMGRIIPILGIANYAQKFQGRVTITADKSTSTAYMELSSLRSEDTAVYYCARGYYEARHYYYYYAMDVWGQGTAVTVSS

SEQ ID NO: 269 - protein, 107 aa, Artificial Sequence
  Description of Artificial Sequence: Synthetic polypeptide
DIQMTQSPSSLSASVGDRVTITCRASQSISSYLSWYQQKPGKAPKLLIYAASSLQSGVPSRFSGSGSGTDFTLTITSLQPEDFATYYCQQSYSTPRTFGQGTKVEIK

SEQ ID NO: 270 - protein, 125 aa, Artificial Sequence
  Description of Artificial Sequence: Synthetic polypeptide
EVQLLESGGGVVQPGGSLRLSCAASGFAFTTYAMNWVRQAPGRGLEWVSAISDGGGSAYYADSVKGRFTISRDNSKNTLYLQMNSLRAEDTAVYYCAKTRGRGLYDYVWGSKDYWGQGTLVTVSS

SEQ ID NO: 271 - protein, 112 aa, Artificial Sequence
  Description of Artificial Sequence: Synthetic polypeptide
DIVMTQSPLSLPVTPGEPASISCRSSQSLLHSNGYNYLDWYLQKPGQSPQLLIYLGSNRASGVPDRFSGSGSGTDFTLKISRVEAEDVGVYYCMQALQTPGTFGQGTRLEIK

SEQ ID NO: 272 - protein, 122 aa, Artificial Sequence
  Description of Artificial Sequence: Synthetic polypeptide
QVQLVQSGAEVKKPGASVKVSCKASGYTFTGYYMHWVRQAPGQGLEWMGWINPNSGGTNYTQMFQGRVTMTRDTSISTAYMEVSRLRSDDTAVYYCARDRSWAVVYYYMDVWGKGTTVTVSS

SEQ ID NO: 273 - protein, 110 aa, Artificial Sequence
  Description of Artificial Sequence: Synthetic polypeptide
QSALTQPPSASGSPGQSVTISCTGTSSDVGGYNYVSWYQQHPGKAPKLMIYEVSKRPSGVPDRFSGSKSGNTASLTVSGLQAEDEADYYCSSYAGSNNLVFGGGTKLTVL

SEQ ID NO: 274 - protein, 119 aa, Artificial Sequence
  Description of Artificial Sequence: Synthetic polypeptide
QITLKESGPTLVKPTQTLTLTCTFSGFSLSTSGVGVGWIRQPPGKALEWLALIYWDDDKRYSPSLKSRLTITKDTSKNQVVLTMTNMDPVDTATYYCAHHKIERIFDYWGQGTLVTVSS

SEQ ID NO: 275 - protein, 109 aa, Artificial Sequence
  Description of Artificial Sequence: Synthetic polypeptide
QSALAQPASVSGSPGQSITISCTGTSSDVGAYNYVSWYQQHPGKAPKLMIYDVSKRPSGVSNRFSGSKSGNTASLTISGLQAEDEADYYCSSYTTSSTVFGGGTKLTVL

SEQ ID NO: 276 - protein, 129 aa, Artificial Sequence
  Description of Artificial Sequence: Synthetic polypeptide
QVQLVQSGAEVKKPGASVRVSCKASGYTFTGYYMHWVRQAPGQGLEWMGWINPISDGTNYAQKFQGWVTMTRDTSISTVYMELSRLRSDDTAVYYCARGGSRCSGGNCYGWAYDAFDIWGQGTMITVSS

SEQ ID NO: 277 - protein, 110 aa, Artificial Sequence
  Description of Artificial Sequence: Synthetic polypeptide
QSALTQPASVSGSPGQSITISCTGTSSDVGGYNFVSWYQQHPGKAPKLMIYDVSKRPSGVSNRFSGSKSGNTASLTISGLQAEDEADCYCSSYTSSSTFVFGTGTKVTVL

SEQ ID NO: 278 - protein, 124 aa, Artificial Sequence
  Description of Artificial Sequence: Synthetic polypeptide
QVQLVQSGAEVKKPGSSVKVSCKASGGTFSSYAISWVRQAPGQGLEWMGGNIPIFGTANYAQKFQGRVTITADESTSTAYMELSSLRSEDTAVYYCARGVGYRGVIPLNWFDPWGQGTVVTVSS

SEQ ID NO: 279 - protein, 108 aa, Artificial Sequence
  Description of Artificial Sequence: Synthetic polypeptide
EIVMTQSPATLSVSPGERATLSCRASQSVSSDLAWYQHKPGQAPRLLIYGASTRATGIPVRFSGSGSGTEFTLTISSLQSEDFAVYYCQQYNNWPPFTFGGGTKVEIK

SEQ ID NO: 280 - protein, 129 aa, Artificial Sequence
  Description of Artificial Sequence: Synthetic polypeptide
QVQLVQSGAEVKKPGASVKVSCKASGYTFTGYYMHWVRQAPGQGLEWMGWINPNSGGTNYAQKFQGRVTMTRDTSITTAYMELRRLRSDDTAVYYCARGLGVGCSGGNCYLDYYYMDVWGKGTTVTVSS

SEQ ID NO: 281 - protein, 110 aa, Artificial Sequence
  Description of Artificial Sequence: Synthetic polypeptide
QSALTQPASVSGSPGQSITISCTGTSSDVGGYNYVSWYQQHPGKAPKLMIYDVSKRPSGVSNRFSGSKSGNTASLTISGLQAEDEGDYYCSSYTSSSTWVFGGGTKLTVL

SEQ ID NO: 282 - protein, 125 aa, Artificial Sequence
  Description of Artificial Sequence: Synthetic polypeptide
QVQLVQSGAEVKKAGSSVKVSCKASGGTFSSHTITWVRQAPGQGLEWMGRIIPILGIANYAQKFQGRVTITADKSTSTAYMELSSLRSEDTAVYYCASLQTVDTAIEKYYGMDVWGQGTTVTVSS

SEQ ID NO: 283 - protein, 106 aa, Artificial Sequence
  Description of Artificial Sequence: Synthetic polypeptide
SYELTQPPSVSVSPGQTASITCSGDKLGDKYACWYQQKPGQSPVLVIYQDNKRPSGIPERFSGSNSGNTATLTISGTQAMDEADYYCQAWDSSTAVFGGGTKLTVL

SEQ ID NO: 284 - protein, 118 aa, Artificial Sequence
  Description of Artificial Sequence: Synthetic polypeptide
EVQLVESGGGLVQPGGSLRLSCAASEITVSSNYMSWVRQAPGKGLEWVSLIYSGGSTFYADSVKGRFIISRDNSKNTLYLQMNSLRAEDTAVYHCARGGEEPLPFDPWGQGTLVTVSS

SEQ ID NO: 285 - protein, 112 aa, Artificial Sequence
  Description of Artificial Sequence: Synthetic polypeptide
QSVLTQPPSVSGAPGQRVTISCTGSSSNIGAGYDVHWYQQLPGTAPKLLIYGNSNRPSGVPDRFSGSKSGTSASLAITGLQAEDEADYYCQSYDSSLSVSVVFGGGTKLTVL

SEQ ID NO: 286 - protein, 123 aa, Artificial Sequence
  Description of Artificial Sequence: Synthetic polypeptide
QVQLVQSGAEVKKPGSSVKVSCKASGGTFSSYPISWVRQAPGQGLEWMGRIIPILRVANFAQRFEGRVTITADKSTGTAYMELSSLRSEDTAMYYCARDEAQTTVNTNWFDPWGQGTLVTVSS

SEQ ID NO: 287 - protein, 111 aa, Artificial Sequence
  Description of Artificial Sequence: Synthetic polypeptide
QSVLTQPPSVSGAPGQRVIISCTGSNSNIGAGYDVHWYQQLPGTAPKLLIYGNNNRPSGVPDRFSGSKSGTSASLAITGLQAEDGADYYCQSYDSSLSDVVFGGGTKLTVL

SEQ ID NO: 288 - protein, 119 aa, Artificial Sequence
  Description of Artificial Sequence: Synthetic polypeptide
EVQLVESGGGLVQPGGSLRLSCAVSGFTVSSNYMSWVRQAPGKGLEWVSVIYTGGGTYYADSVKGRFTISRDNSKNTLYLQMNTLRAEDTTVYYCARGDGSYYRAFDYWGQGTLVTVSS

SEQ ID NO: 289 - protein, 107 aa, Artificial Sequence
  Description of Artificial Sequence: Synthetic polypeptide
DIQMTQSPSSLSASVGDRVTITCRASQSISNYLNWYHQKPGKAPKLLIYAASSLQSGVPSRFSGSGSGTDFTLTISSLQPEDFATYYCQQSYSPPPTFGPGTKVEIK

SEQ ID NO: 290 - protein, 116 aa, Artificial Sequence
  Description of Artificial Sequence: Synthetic polypeptide
EVQLVESGGGLIQPGGSLRLSCAASGFTVSRNYMNWVRQAPGKGLEWVSVIYSGGSTFYADSVKGRFTISRDNSKNTLYLQMNSLRAEDTAVYYCARDASSYGIDWGQGTLVTVSS

SEQ ID NO: 291 - protein, 108 aa, Artificial Sequence
  Description of Artificial Sequence: Synthetic polypeptide
DIQMTQSPSSLSASVGDRVTITCRASQSISSYLNWYQQKPGKAPKLLIYASSSLQRGVPSRFSGSGSGTDFTLTISSLQPEDFATYYCQQSYSTPPITFGQGTRLEIK

SEQ ID NO: 292 - protein, 120 aa, Artificial Sequence
  Description of Artificial Sequence: Synthetic polypeptide
QVQLKQSGPGLVAPSQSLSITCTVSGFSLINYAISWVRQPPGKGLEWLGVIWTGGGTNYNSALKSRLSISKDNSKSQVFLKMNSLQTDDTARYYCARKDYYGRYYGMDYWGQGTSVTVSS

SEQ ID NO: 293 - protein, 109 aa, Artificial Sequence
  Description of Artificial Sequence: Synthetic polypeptide
QAVVTQESALTTSPGETVTLTCRSSTGAVTTSNYANWVQEKPDHLFTGLIGGTNNRAPGVPARFSGSLIGDKAALTITGAQTEDEAIYFCALWYNNHWVFGGGTKLTVL

SEQ ID NO: 294 - protein, 121 aa, Artificial Sequence
  Description of Artificial Sequence: Synthetic polypeptide
EVQLVQSGPEVKKPGTSVKVSCKASGFTFSSSAVQWVRQARGQRLEWIGWIVVGSGNYAQKFQERVTITRDMSTNTAYMELSSLRSEDTAVYYCAAAYCSGGSCSDGFDIWGQGTMVTVSS

SEQ ID NO: 295 - protein, 108 aa, Artificial Sequence
  Description of Artificial Sequence: Synthetic polypeptide
EIVLTQSPGTLSLSPGERATLSCRASQSVSSSYLAWYQQKPGQAPRLLICATSSRATGIPDRFSGSGSGTDFTLTIRRLEPEDFALYYCQQYGSSPWTFGQGTKVEIK

SEQ ID NO: 296 - protein, 122 aa, Artificial Sequence
  Description of Artificial Sequence: Synthetic polypeptide
EVQLQQSGAELVKPGASVKLSCTTSGFNIIDTYMHWVKQRPEEGLEWIGGIDPVNGNSEYDPKFQDKATITADTSSNTAYLHLSRLTSEDTAVYYCASAHYYGSSSSFPYWGQGTDLVTVSA

SEQ ID NO: 297 - protein, 106 aa, Artificial Sequence
  Description of Artificial Sequence: Synthetic polypeptide
DIVMTQSQKFMSTSVGDRVSVTCKASQNVGTHVAWYQQKPGQSPKALIYSASYRYSGVPDRFTGSGVGTDFTLTITNVQSEDLAEYFCQQYNSYFTFGSGTKLEIK

SEQ ID NO: 298 - protein, 118 aa, Artificial Sequence
  Description of Artificial Sequence: Synthetic polypeptide
QVQLQQWGAGLLKPSETLSLTCAVYGGSFSGYYWSWIRQPPGKGLEWIGEINHSGSTNYNPSLKSRVTISVDTSKNQFSLKLSSVTAADTAVYYCARRWWLRGAFDIWGQGTTVTVSS

SEQ ID NO: 299 - protein, 110 aa, Artificial Sequence
  Description of Artificial Sequence: Synthetic polypeptide
NFMLTQPHSVSASPGKTVTIPCTGSSGNIASNYVQWYQQRPGSAPTTVIYEDNQRPSGVPDRFSGSIDSSSNSASLTISGLKTEDEADYYCQSYDNNIQVFGGGTKLTVL

SEQ ID NO: 300 - protein, 119 aa, Artificial Sequence
  Description of Artificial Sequence: Synthetic polypeptide
QVQLQESGGGLVQPGGSLRLSCAASGFTFSSYEMNWVRQAPGKGLEWVAVISYDGSNKYYADSVKGRFTISRDNAKNSLYLQMNSLRAEDTAVYYCARLITMVRGEDYWGQGTLVTVSS

SEQ ID NO: 301 - protein, 107 aa, Artificial Sequence
  Description of Artificial Sequence: Synthetic polypeptide
DIQLTQSPSSLSASVGHRVTITCRASQSISSYLNWYQQKPGKAPKLLIYAASSLQSGVPSRFSGSGSGTDFTLTISSLQPEDFATYYCQQSYNLPRTFGGGTKLEVL

SEQ ID NO: 302 - protein, 125 aa, Artificial Sequence
  Description of Artificial Sequence: Synthetic polypeptide
EVQLVESGGGLVQPGGSLRLSCAASGVTVSSNYMSWVRQAPGKGLEWVSAVYSGGSTYYADSVKGRFTISRHNSKNTLYLQMKSLRPEDTAIYYCARLINHYYDSSGDGGAFDIWGQGTMVTVSS

SEQ ID NO: 303 - protein, 107 aa, Artificial Sequence
  Description of Artificial Sequence: Synthetic polypeptide
LTQPASVSGSPGQSITISCTGTSSDVGSYNLVSWYQQRPGKAPKLILYEVTKRPSGVSNRFSGSKSGNTASLAISGLQAEDEADYYCCSYAGSSTWVFGGGTKLTVL

SEQ ID NO: 304 - protein, 123 aa, Artificial Sequence
  Description of Artificial Sequence: Synthetic polypeptide
QVQLVQSGAEVKKPGSSVKVSCKASGGTFSSYAISWVRQAPGQGLEWMGRIISMFGIANNAQKFQGRLTITADTSTSTAYMELSSLRSEDTAVYYCARGPYYYDSGGYYLDYWGQGTLVTVSS

SEQ ID NO: 305 - protein, 108 aa, Artificial Sequence
  Description of Artificial Sequence: Synthetic polypeptide
EIVLTQSPGTLSLSPGERATLSCRASQSVGSGYLAWYQQRPGQAPRLLIYGASSRATGIPDRFSGSGSGTDFTLTISRLEPEDFAVYYCQQYAGSPRTFGQGTRLEIK

SEQ ID NO: 306 - protein, 118 aa, Artificial Sequence
  Description of Artificial Sequence: Synthetic polypeptide
EVQLVESGGGLIQPGGSLRLSCAASGITVVRNYMTWVRQAPGKGLEWVSVIYSGGTTYYADSVKGRFTISRDNSKNTMYLQMNSLRAEDTAIYYCARDLEVVGAMDVWGQGTTVTVSS

SEQ ID NO: 307 - protein, 108 aa, Artificial Sequence
  Description of Artificial Sequence: Synthetic polypeptide
EIVLTQSPGTLSLSPGERATLSCRASQSVPSSYLAWYQQKPGQAPRLLIYGASSRATGIPDRFSGSGSGTDFTLTISRLEPEDFAVYYCQQYGSPMYTFGQGTKLEIK

SEQ ID NO: 308 - protein, 118 aa, Artificial Sequence
  Description of Artificial Sequence: Synthetic polypeptide
QVQLVQSGAEVKKPGASVKVSCKASGYTFTSYAISWVRQAPGQGLEWMGWVSAYNGNTNYAQKLQGRVTMTTDTSTNTAYMELRSLRSDDTAIYYCAIPYSSVTFDCWGQGTLVTVSS

SEQ ID NO: 309 - protein, 108 aa, Artificial Sequence
  Description of Artificial Sequence: Synthetic polypeptide
EIVLTQSPGTLSLSPGERATLSCRASQSVSGTFLAWYQQKPGQAPRLLISGASSRATGIPDRFSGSGSGTDFTLTISRLEPEDFAVYYCQQYGSSRPTFGQGTKLEIK

SEQ ID NO: 310 - protein, 128 aa, Artificial Sequence
  Description of Artificial Sequence: Synthetic polypeptide
QVQLVQSGAEVKKAGASVKVSCKASGYTFTSYDINWVRQASGQGLEWMGWMNPISGNTGYAQKFQGRVTMTRNTSITTAYMELSSLRSEDTAVYFCARGGRYCSSTTCYSGVGMDVWGQGTTVTVPSA

SEQ ID NO: 311 - protein, 111 aa, Artificial Sequence
  Description of Artificial Sequence: Synthetic polypeptide
QSVLTQPPSVSGAPGQRVTISCTGSSSNIGAGYDVHWYHQLPGTAPKFLIYGNSNRPSGVPDRFSGSKSGTSASLAITRLQAEDEADYYCQSYDSSLSGWVFGGGTKLTVL

SEQ ID NO: 312 - protein, 128 aa, Artificial Sequence
  Description of Artificial Sequence: Synthetic polypeptide
EVQLVQSGAEVKKPGASVKVSCKVSGYTLTELSMHWVRQAPGKGLEWMGGFDPEDAETIYAQKFQGRVTMTEDTSTDTAYMELSSLRSEDTAVYYCVTAPAITGSPEAYSYYYGMDVWGQGTTVTVSS

SEQ ID NO: 313 - protein, 112 aa, Artificial Sequence
  Description of Artificial Sequence: Synthetic polypeptide
DIVMTQTPLSSPVTLGQPASISCRSSQSLVHSDGNTYLSWLQQRPGQPPRLLIYKISNRFSGVPDRFSGSGAGTDFTLKISRVEAEDVGVYYCMQATQFPYTFGQGTKLEIK

SEQ ID NO: 314 - protein, 123 aa, Artificial Sequence
  Description of Artificial Sequence: Synthetic polypeptide
QVQLVQSGAEVKKPGASVKVSCKVSGYTLPELSMHWVRQAPGKGLEWMGGFDPEDGETIYAQKFQGRVTMTEDTSTDTAYMELSSLRSEDTAVYYCATGPAIAAAATGWFDPWGQGTLVTVSS

SEQ ID NO: 315 - protein, 107 aa, Artificial Sequence
  Description of Artificial Sequence: Synthetic polypeptide
SYELIQEPSVSVSPGQTARITCQGDSLRSYYASWYQQKPGQAPVLVIYNRNKRPSGIPDRFSGSSSGNTASLTITGAQADDEADYYCNSRDNSGNHPFGGGTKVTVL

SEQ ID NO: 316 - protein, 128 aa, Artificial Sequence
  Description of Artificial Sequence: Synthetic polypeptide
QVQLQQSGAEVKKPGASVKVSCKVSGYTLTELSMHWVRQAPGKGLEWMGGFDPEDAETIYAQKFQGRVTMTEDTSTDTAYMELSSLRSEDTAVYYCVTAPVITGSPEAYSYYYGMDVWGQGTTVNVSS

SEQ ID NO: 317 - protein, 111 aa, Artificial Sequence
  Description of Artificial Sequence: Synthetic polypeptide
DIVMTQSPLSSPVTLGQPASISCRSSQSLVHSDGNTYLSWLQQRPGQPPRLLIYKISNRFSGVPDRFSGSGATDFTLKISRVEAEDVGVYYCMQATQFPITFGGGTKVEIK

SEQ ID NO: 318 - protein, 123 aa, Artificial Sequence
  Description of Artificial Sequence: Synthetic polypeptide
QMQLVQSWGRRGPAGRSLRLSCAASGSTFSSYGMHWVRQAPGKGLEWVAVISFDGSNKFYADSVKGRFTISRDNSKNTLYLQMNSLRAEDTAVYYCAKDHDDGYYFYYYMDVWGKGTTVTVSS

SEQ ID NO: 319 - protein, 107 aa, Artificial Sequence
  Description of Artificial Sequence: Synthetic polypeptide
EIVLTQSPGTLSLSPGERATLSCRASQSVSSSYLAWYQQKPGQAPRLLIYGASSRATGIPDRFSGSGSGTDFTLTISRLEPEDFAVYYCQQYGSSRTFGGGTRLEIK

SEQ ID NO: 320 - protein, 128 aa, Artificial Sequence
  Description of Artificial Sequence: Synthetic polypeptide
EVQLVQSGAEVKKPGASVKVSCKVSGYTLTELSMHWVRQAPGKGLEWMGGFDPEDGETIYAQKFQGRVTMTEDTSTDTAYMELSSLRSEDTAVYYCAASPAVRGSPSNFYYYHGMDVWGQGTMVTVSS

SEQ ID NO: 321 - protein, 110 aa, Artificial Sequence
  Description of Artificial Sequence: Synthetic polypeptide
QSVVTQPASVSGSPGQSITISCTGSSSDIGGYNYVSWYQQHPGKAPKLMIFEGSKRPSGVPDRFSGSKSGNTASLTISGLQAEDEADYYCSSYTSSSTLVFGGGTELTVL

SEQ ID NO: 322 - protein, 128 aa, Artificial Sequence
  Description of Artificial Sequence: Synthetic polypeptide
QVQLQQSGAEVKKPGASVRVSCKVSGYTLTELSMHWVRQAPGKGLEWMGGFDPEDAETIYAQKFQGRVTMTEDTSTDRAYMELSSLRSEDTAVYYCVAAPVITGSPEAYSYYYGMDVWGQGTTVTVSS

SEQ ID NO: 323 - protein, 113 aa, Artificial Sequence
  Description of Artificial Sequence: Synthetic polypeptide
SQSALTQPGSLSGSPGQSITISCTGTSSDVGSYNLVSWYQQHPGQTPKVIIYEVTNRASGVSNRCSGSQSGNTATLTISRLLADDQADDYCSSYTRTSTLDVVFGGRTELTVL

SEQ ID NO: 324 - protein, 129 aa, Artificial Sequence
  Description of Artificial Sequence: Synthetic polypeptide
QLQLQESGPGLVKPSQTLSLTCTVSGGSISSGSYYWSWIRQPAGKGLEWIGRIYTTGSTSYNPSLKSRVTISVDTSKNQFSLKLSSVTAADTAVYYCARMAYQVYYYDSSGYYDAFDIWGQGTMVTVSS

SEQ ID NO: 325 - protein, 109 aa, Artificial Sequence
  Description of Artificial Sequence: Synthetic polypeptide
NILTQPPSASGTPGQRVTISCSGSSSNIGSNTVNWYQQLPGTAPKLLIYSKNQRPSGVPDRFSGSKSGTSASLAISGLRSEDEADYYCSAWDDSLRGYVFGPGTKVTVL

SEQ ID NO: 326 - protein, 129 aa, Artificial Sequence
  Description of Artificial Sequence: Synthetic polypeptide
QVQLQESGPGLVKPSQTLSLTCTVSGGSISSGSYYWSWIRQPAGKGLEWIGRIYTTGSTNYNPSLKSRVTISVDTSKNQFSLKLSSVTAADTAVYYCARMAYQVYYYDSSGYYDAFDIWGQGTMVTVSS

SEQ ID NO: 327 - protein, 110 aa, Artificial Sequence
  Description of Artificial Sequence: Synthetic polypeptide
QSALTQPASASGSPGQSVTISCTGSSSDVGGYNFVSWYQQHPGKAPKLIIYEVSKRPSGVPNRFSGSKSGNTASLTVSGLQADDEALYYCSSYAGSNNYVFGPGTKVTVL

SEQ ID NO: 328 - protein, 121 aa, Artificial Sequence
  Description of Artificial Sequence: Synthetic polypeptide
EVQLVQSGAEVKKPGASVKVSCKVSGYTLPELSMHWVRQAPGKGLEWMGGFDPEDGGTIYAQKFQGRVTMTEDTSTDTAYMELSSLRSEDTAVYYCATSRVAGTPNWFHPWGQGTLVTVSS

SEQ ID NO: 329 - protein, 110 aa, Artificial Sequence
  Description of Artificial Sequence: Synthetic polypeptide
QSVLTQPASVSGSPGQSITISCTGTSSDVGGYNYVSWYQQHPGKAPKLMIYDVSNRPSGVPDRFSGSKSGNTASLTISGLQAEDEADYYCSSYTSSSTLVFGTGTKVTVL

SEQ ID NO: 330 - protein, 117 aa, Artificial Sequence
  Description of Artificial Sequence: Synthetic polypeptide
EVQLLESGGGVVQPGRSLRLSCAASGFTFSSYAMHWVRQAPGKGLQWVALISYDGSNKYYADSVKGRFTISRDNSKNTLYLQMNSLRAEDTAVYYCARDLGSGWYPWGQGTLVTVSS

SEQ ID NO: 331 - protein, 106 aa, Artificial Sequence
  Description of Artificial Sequence: Synthetic polypeptide
NFMLTQPPSVSVSPGQTASITCSGDKLGDKYASWYQQKPGQSPVLVIYQDSKRPSGIPERFSGSNSGNTATLTISGTQAMDEADYYCQAWDSSTVVFGGGTELTVL

SEQ ID NO: 332 - protein, 121 aa, Artificial Sequence
  Description of Artificial Sequence: Synthetic polypeptide
QVQLVQSGAGVKKPGASVKVSCKVSGYTLPELSMHWVRQAPGKGLEWMGGFDPEDGETIYAQKFQGRVTMTEDTSTDTAYMELSSLRSEDTAVYYCATSRVAGTPNWFHPWGQGTLVTVSS

SEQ ID NO: 333 - protein, 112 aa, Artificial Sequence
  Description of Artificial Sequence: Synthetic polypeptide
QSALTQPVSVSGSPGQSITISCTGTSSDVGRYNYVSWYQQHPGKAPKLIIYDVKNRPSGVPDRFSGSKSGNTASLTISGLQAEDEADYYCSSYTRSSTLDVVFGGGTELTVL

SEQ ID NO: 334 - protein, 117 aa, Artificial Sequence
  Description of Artificial Sequence: Synthetic polypeptide
EVQLVESGGGLVQPGGSLRLSCAASGLTVSSNYMSWVRQAPGKGLEWVSVIYSGGSTFYADSVKDRFTISRDNSKNTLYLQMNSLRAEDTAVYYCVRDLYSYGMDVWGQGTTVTVSS

SEQ ID NO: 335 - protein, 106 aa, Artificial Sequence
  Description of Artificial Sequence: Synthetic polypeptide
AIQMTQSPSFLSASVGDRVTITCRASQGISSYLAWYQQKPGKAPKLLIYAASTLQSGVPSRFSGSGSGTEFTLTISSLQPEDFATYYCQQVNSYPTFGQGTRLEIK

SEQ ID NO: 336 - protein, 122 aa, Artificial Sequence
  Description of Artificial Sequence: Synthetic polypeptide
EVQLQQWGAGLLKPSETLSLTCAVYGGSFSGYYWSWIRQPPGKGLEWIGEVNHSGSTNYNPSLKSRVTISVDTSKNQLSLKLNSVTAADTAVYYCARGNTMVRGVIIPFEYWDKGTLVTVSS

SEQ ID NO: 337 - protein, 107 aa, Artificial Sequence; identical to SEQ ID NO: 107
  Description of Artificial Sequence: Synthetic polypeptide

SEQ ID NO: 338 - protein, 114 aa, Artificial Sequence
  Description of Artificial Sequence: Synthetic polypeptide
EVQLLESGGGLVQPGGSLRLSCAASGFTFSSYVMTWARQAPGKGLEWVSAISGTGYTYYADSVKGRFTVSRDNSKNTLFLQMSSLRAEDTAVYYCAITMAPVVWGQGTTVTVSS

SEQ ID NO: 339 - protein, 108 aa, Artificial Sequence
  Description of Artificial Sequence: Synthetic polypeptide
SYELTQPPSVSVSPGQTARITCSGDALPKRYAYWYQQKSGQAPILVIYEDKKRPSGIPERLSGSKSGTVATLTISGAQVEDEADYYCYSTDSSGNHAVFGGGTQLTVL

SEQ ID NO: 340 - protein, 121 aa, Artificial Sequence
  Description of Artificial Sequence: Synthetic polypeptide
QVQLVESGGGLVKPGGSLRLSCAASGFTFSDYYMSWIRQAPGKGLEWVSSIDGSTSYTKYADSVKGRFTISRDNAKNSLYLQMNSLRAEDTAVYYCARVGPAVAGSPFDSWGQGTLVTVSS

SEQ ID NO: 341 - protein, 107 aa, Artificial Sequence
  Description of Artificial Sequence: Synthetic polypeptide
EIVLTQSPATLSLSPGERATLSCRASQSVSTYLAWYQQKPGQAPRLLIFDASNRATGIPARFSGSGSGTDFTLTISSLEPEDFAVYYCQQRSNWLFSFGPGTKVDIK

SEQ ID NO: 342 - protein, 123 aa, Artificial Sequence
  Description of Artificial Sequence: Synthetic polypeptide
QVQLVQSGPEVKKPGASVKVSCQTSGYSFSDHYLHWVRQTPGQGFEWMGWIKPKSGATNSADNFQDRVTMTADASVNTAYMELSSLRPDDTAVYYCARGHRIPSAISDKYDFWGQGTLVTVSS

SEQ ID NO: 343 - protein, 111 aa, Artificial Sequence
  Description of Artificial Sequence: Synthetic polypeptide
QSVLTQPASVSASPGQSITISCTGTSSDVGGYDYVSWYQHHPDNAPKLLIFEVSNRPSGVSNRFSGSKSGNAASLTISGLLAEDEADYFCTSYSSGRTPYVFGTGTKVTVL

SEQ ID NO: 344 - protein, 119 aa, Artificial Sequence
  Description of Artificial Sequence: Synthetic polypeptide
EVQLVESGGGLIQPGGSLRLSCAASGLTVSSNYMSWVRQAPGKGLEWVSVIYSGGSTFYADSVKGRFTISRDNSKNTLYLQMNSLGAEDTAVYYCARGEGSPGNWFDPWGQGTLVTVSS

SEQ ID NO: 345 - protein, 107 aa, Artificial Sequence
  Description of Artificial Sequence: Synthetic polypeptide
DVVMTQSPGTLSLSPGERATLSCRASQSVPSSYLAWYQQKPGQAPRLLIYGASTRATGIPDRFSGSGSGTDFTLTISRLEPEDFAVYYCQHYDTSPRFGGGTKVDIK

SEQ ID NO: 346 - protein, 120 aa, Artificial Sequence
  Description of Artificial Sequence: Synthetic polypeptide
EVQLVESGGGLVQPGGSLRLSCAASGFTVSINYMSWVRQAPGKGLEWVSVIYSGGSTYYADSVKGRFTISRDNSKNTLYLQMNSLRAEDTAVYYCAAPLLWADSYYMDVWGKGTTVTVSS

SEQ ID NO: 347 - protein, 107 aa, Artificial Sequence
  Description of Artificial Sequence: Synthetic polypeptide
AIQMTQSPSSLSASVGDRVTITCRASQDIRNNLGWFQQKPGKAPKRLIYAASTLQRGVPSRFSGSGSGTEFTLTISSLQPEDFATYYCLQHNSYLWTFGQGTKVEIK

SEQ ID NO: 348 - protein, 121 aa, Artificial Sequence
  Description of Artificial Sequence: Synthetic polypeptide
QVQLVQSGAEVKKPGPSVKVSCKASGGTFSSYTINWVRQAPGQGLEWMGRIIPMLGIAKYAQKFQGRVTITADKSTSTAYMELSSLRSEDTAVYYCARGIVGATPGYFDYWGQGTLVTVSS

SEQ ID NO: 349 - protein, 106 aa, Artificial Sequence
  Description of Artificial Sequence: Synthetic polypeptide
DIVMTQSPAALSVSPGERATLSCRASQSVSSNLAWYQQKPGQAPRLLIYGASTRATGIPARFSGSWSGTEFTLTISSLQSEDLAVYYCQQYNNWLTFGGGTKVEIK

SEQ ID NO: 350 - protein, 122 aa, Artificial Sequence
  Description of Artificial Sequence: Synthetic polypeptide
QVQLVQSGAEVKKPGSSVKVSCKASGGTFSSYAISWVRQAPGQGLEWMGGITPIFHTANYAQKFQGRVTITADESTSTVYMELSSLSSEDTAVYYCARETGDQGVTAPFDLWGRGTLVTVSS

SEQ ID NO: 351 - protein, 108 aa, Artificial Sequence
  Description of Artificial Sequence: Synthetic polypeptide
EIVMTQSPATLSLSPGERATLSCRASQSVSSYLAWYQQKPGQAPRLLIYDASNRATGIPARFSGSGSGTDFTLTISSLEPEDFAVYYCQLRGNWPPWTFGQGTKVEIK

SEQ ID NO: 352 - protein, 123 aa, Artificial Sequence
  Description of Artificial Sequence: Synthetic polypeptide
QVQLVQSGPEVKKPGTSVKVSCKASGFTFTSSAMQWVRQARGQRLEWIGWIVVGSGNTDYVQKFQGRVTITRDMSTSTAYMELSSLRSEDTAVYYCAAPYCSSTTCHDGFDIWGQGTMVTVSS

SEQ ID NO: 353 - protein, 108 aa, Artificial Sequence
  Description of Artificial Sequence: Synthetic polypeptide
EIVMTQSPGTLSLAPGERATLSCRASQSVSSSYLGWYQQKPGQAPRLLIYGASSRATGIPDRFSGSGSGTDFTLTISRLEPEDFAVYYCQQYGRSPWTFGQGTKVEIK

SEQ ID NO: 354 - protein, 125 aa, Artificial Sequence
  Description of Artificial Sequence: Synthetic polypeptide
QVQLVQSGAEVKKPGSSVKVSCKASGGTFSSYTISWVRQAPGQGLEWMGRIIPILDRVMYAQKFQGRVTITADKSTSTAYMELSSLRSEDTAVYYCARRAIDSDTYVEQSHFDYWGQGTLVTVSS

SEQ ID NO: 355 - protein, 103 aa, Artificial Sequence
  Description of Artificial Sequence: Synthetic polypeptide
EIVMTQSPATLSLSPGERATLSCRASQSVSSYLAWYQQKPGQAPSLLIYDASNRATGIPARFSGSGSGTDFTLTISSLEPEDFAVYYCQQPLTFGGGTKVEIK

SEQ ID NO: 356 - protein, 124 aa, Artificial Sequence
  Description of Artificial Sequence: Synthetic polypeptide
QVQLQESGAEVKKPGSSVKVSCKASGGTFSSYAINWVRQAPGQGLEWMGGLIPIFGTANYAQKFQGRVTITADESTSTAYMELSSLRSEDTAVYYCANFIGDGYNYEEDYMDVWGKGTTVTVSS

SEQ ID NO: 357 - protein, 108 aa, Artificial Sequence
  Description of Artificial Sequence: Synthetic polypeptide
EIVMTQSPATLSLSPGERATLSCRASQSVSSFLAWYQQKPGQAPRLLIYDASNRATGIPARFSGSGSGTDFTLTISSLEPEDFAVYYCQQRSNWPPFTFGPGTKVDIK

SEQ ID NO: 358 - protein, 118 aa, Artificial Sequence
  Description of Artificial Sequence: Synthetic polypeptide
EVQLVESGGGLVKPGGSLRLFCAASGFTFSDYYMSWFRQAPGKGLEWVSYISSSGSNIYYADSVKGRFTVSRDNAKNSLYLQMNSLRAEDTAVYFCARGRLWGWFDPWGQGTLVTVSS

SEQ ID NO: 359 - protein, 107 aa, Artificial Sequence
  Description of Artificial Sequence: Synthetic polypeptide
DIVMTQSPSSLSASVGDRVTITCQASQDISNYLNWYQQKPGKAPKLLIYDASNLQTGVPSRFSGSGSGTDFTFTISSLQPEDIATYYCQQYDHLLITFGQGTRLEIK

SEQ ID NO: 360 - protein, 119 aa, Artificial Sequence
  Description of Artificial Sequence: Synthetic polypeptide
QITLKESGPTLVKPTQTLTLTCTFSGFSLSISGVGVGWLRQPPGKALEWLALIYWDDDKRYSPSLKSRLTISKDTSKNQVVLKMTNIDPVDTATYYCAHHSISTIFDHWGQGTLVTVSS

SEQ ID NO: 361 - protein, 109 aa, Artificial Sequence
  Description of Artificial Sequence: Synthetic polypeptide
QSALTQPASVSGSPGQSITISCTATSSDVGDYNYVSWYQQHPGKAPKLMIFEVSDRPSGISNRFSGSKSGNTASLTISGLQAEDEADYYCSSYTTSSAVFGGGTKLTVL

SEQ ID NO: 362 - protein, 123 aa, Artificial Sequence
  Description of Artificial Sequence: Synthetic polypeptide
QVQVVQSGAEVKKPGASVKVSCKVSGYTLIEISIHWVRQAPGKGLEWMGGFDPEAGETIYAQKFQGRVTMTEDTSTDTAYMEVSSLRSEDTAVYYCATGPAIAAAETNWFDLWGQGTLVTVSS

SEQ ID NO: 363 - protein, 110 aa, Artificial Sequence
  Description of Artificial Sequence: Synthetic polypeptide
QSALTQPASVSGSPGQSITISCTGTSSDVGSYNYVSWYQQHPGKAPKLMIYDVTKRPSGVPDRFSGSKSGNTASLTISGLQAEDEADYYCSSYTSSSTWVFGGGTKLTVL

SEQ ID NO: 364 - protein, 125 aa, Artificial Sequence
  Description of Artificial Sequence: Synthetic polypeptide
EVQLVESGGGLVKPGGSLRLSCAASEFTFSSYSMNWVRQAPGKGLEWVSSISSSGSQIYYADSVKGRFTISRDNAKKSLYLQMNSLRVEDTAVYYCATNGGAHSSTWSFYGMDVWGQGTTVTVSS

SEQ ID NO: 365 - protein, 106 aa, Artificial Sequence
  Description of Artificial Sequence: Synthetic polypeptide
SYELTQPPSVSVSPGQTATITCSGDKLGDKYACWYQQRPGQSPVLVIYQDSKRPSGIPERFSGSNSGNTATLTIGGTQAMDEAAYFCQAWDSNTGVFGGGTKLTVL

SEQ ID NO: 366 - protein, 123 aa, Artificial Sequence
  Description of Artificial Sequence: Synthetic polypeptide
EVQLVESGGGLVKPGGSLRLSCAASGFSFSSYSMNWVRQAPGKGLEWVSSISSNSNYIYYADSMKGRFTISRDNAKNSLYLQMNSLRAEDTAVYYCASNRSPYDSSNYYFDYWGQGTRVTISS

SEQ ID NO: 367 - protein, 107 aa, Artificial Sequence
  Description of Artificial Sequence: Synthetic polypeptide
AIRMTQSPSSLSASVGDRVTITCQASQDISNYLNWYQQKPGKAPKLLIYDASNLETGVPSRFSGSGSGTDFTFTISSLQPEDIATYYCQHHDSLPLTFGGGTKVEIK

SEQ ID NO: 368 - protein, 120 aa, Artificial Sequence
  Description of Artificial Sequence: Synthetic polypeptide
EVQLVESGGGVVQPGRSLRLSCAASGFTFSYYGMHWVRQAPGKGLEWVAVIWYDGSNRFYADSVKGRFTISRDNSKSTLYLQMNSLRAEDTAVYYCATDPPGLRFRFDYWGQGTLVTVSS

SEQ ID NO: 369 - protein, 112 aa, Artificial Sequence
  Description of Artificial Sequence: Synthetic polypeptide
DIVMTQSPLSLPVTPGEPASISCRSSQSLLHSNGYNYLDWYLQKPGQSPQLLIYLGSNRASGVPDRFSGSGSGTDFTLKISRVEAEDVGVYYCMQGLQTPLTFGGGTKVEIK

SEQ ID NO: 370 - protein, 120 aa, Artificial Sequence
  Description of Artificial Sequence: Synthetic polypeptide
EVQLQQSGPELVKPGASVKISCKTSGYTFTEYTMHWVKQSHGKSLEWIGGINPNNGDNTYNQKLKGKATLTVHKSSSTAYMELRSLTSEDSAVYYCARDGYPYYYALDYWGQGTSVTVSS

SEQ ID NO: 371 - protein, 107 aa, Artificial Sequence
  Description of Artificial Sequence: Synthetic polypeptide
DIVMTQSQKFMSTSVGDRVSVTCKASQNVGTNVAWYQQKPGQSPKPLIYSASSRYSGVPDRFTGSGSGTDFTLTISNVQSEDLAEYFCQQYNNYPWTFGGGTKLEIK

SEQ ID NO: 372 - protein, 119 aa, Artificial Sequence
  Description of Artificial Sequence: Synthetic polypeptide
QVQLVQSGAEVKKPGASVKLSCKASGYSFTSYWVNWVRQAPGQGLEWIGMIHPSDSETRLNQKFKDRVTITVDKSTSTAYMELSSLRSEDTAVYYCARADGYEWYFDVWGRGTLVTVSS

SEQ ID NO: 373 - protein, 111 aa, Artificial Sequence
  Description of Artificial Sequence: Synthetic polypeptide
DIVLTQSPASLAVSPGQRATITCRASESVDSYGNSFMHWYQQKPGQPPKLLIYRASNLESGIPARFSGSGSGTDFTLTINPVEANDVANYYCQQSNEDPWTFGQGTKVEIK

SEQ ID NO: 374 - protein, 114 aa, Artificial Sequence
  Description of Artificial Sequence: Synthetic polypeptide
QVQLQQSGAELVKPGASVKLSCKASGYTFTSYYIYWMKQRPGQGLEWIGEINPNNGGTNFNEKFKSKATLTVDKSSSTAYMQLSSLTSEDSAVYYCTRGHSDYWGQGTTLTVSS

SEQ ID NO: 375 - protein, 111 aa, Artificial Sequence
  Description of Artificial Sequence: Synthetic polypeptide
DIVLTQSPASLAVSLGQRATISCRASESVEYYGTGLMQWYQQKPGQPPKLLIYAASNVESGVPARFSGSGSGTDFSLNIHPVEEDDIAMYFCQQTRKVPYTFGGGTKLEIK

SEQ ID NO: 376 - protein, 126 aa, Artificial Sequence
  Description of Artificial Sequence: Synthetic polypeptide
EVQLVESGGGLVNPGGSLRLSCAASGFTFSDYTIHWVRQAPGKGLEWVSSISSSSNYIYYADSVKGRFTISRDNAKNSLSLQMNSLRAEDTAVYYCARDGNAYKWLLAENVRFDYWGQGTLVTVSS

SEQ ID NO: 377 - protein, 107 aa, Artificial Sequence
  Description of Artificial Sequence: Synthetic polypeptide
VTQPASVSGSPGQSITISCTGTSSDVGGYNYVSWYQQHPGKAPKLMIYDVSDRPSGVSNRFSGSKSGNTASLTISGLQAEDEADYYCSSYTSSSTPNWVFGGGTKLT

SEQ ID NO: 378 - protein, 117 aa, Artificial Sequence
  Description of Artificial Sequence: Synthetic polypeptide
VQLVESGGGVVQPGRSLRLSCAASGFTFSSYGMHWVRQAPGKGLEWVTVIWYDGSNRYYADSVKGRFTISRDNSKNTLYLQMDSLRAEDTAVYYCARAVAGEWYFDYWGQGTLVTVS

SEQ ID NO: 379 - protein, 106 aa, Artificial Sequence
  Description of Artificial Sequence: Synthetic polypeptide
YELTQPPSVSVSPGQTARITCSGDALAKHYAYWYRQKPGQAPVLVIYKDSERPSGIPERFSGSSSGTTVTLTISGVQAEDEADYYCQSADSIGSSWVFGGGTKLTV

SEQ ID NO: 380 - protein, 121 aa, Artificial Sequence
  Description of Artificial Sequence: Synthetic polypeptide
VQLVESGGGVVQPGRSLRLSCAASGFTFSNYGMHWVRQAPGKGLEWVAVIWYDGSNKFYADSVKGRFTISRDNSKNSLYLQMNSLRAEDTAVYFCARAFPDSSSWSGFTIDYWGQGTLVTV

SEQ ID NO: 381 - protein, 100 aa, Artificial Sequence
  Description of Artificial Sequence: Synthetic polypeptide
YELTQPPSVSTARITCGGNNIERKSVHWCQQKPGQAPALVVYDDSDRPSGIPERFSGSNSGNTATLTISRVEAGDEADYYCQVWDSGSDQVIFGGGTKLT

SEQ ID NO: 382 - protein, 120 aa, Artificial Sequence
  Description of Artificial Sequence: Synthetic polypeptide
QVRLVQSGAEVKKSGESLKISCKGSGYSFTSYWIGWVRQMPGKGLEWMGIIYPGDSDTRYSPSFQGQVTISADKSISTVYLQWSSLKASDTAMYYCARQWSHYTYDYYYWGQGTLVTISS

SEQ ID NO: 383 - protein, 112 aa, Artificial Sequence
  Description of Artificial Sequence: Synthetic polypeptide
QSVLTQPASVSGSPGQSITISCTGISSDVGGYNSVSWYQQHPGKAPKLMIYDVTNRPSGVSNRFSGSKSGNTASLTISGLQAEDEADYYCSSYTSSSTPPYVFGTGTKVSVL

SEQ ID NO: 384 - protein, 126 aa, Artificial Sequence
  Description of Artificial Sequence: Synthetic polypeptide
QVQLVQSGAEVKKPGSSVKVSCKASGGIFNTYTISWVRQAPGQGLEWMGRIILMSGMANYAQKIQGRVTITADKSTSTAYMELTSLRSDDTAVYYCARGFNGNYYGWGDDDAFDIWGQGTLVTVYS

SEQ ID NO: 385 - protein, 113 aa, Artificial Sequence
  Description of Artificial Sequence: Synthetic polypeptide
QTVLTQPPSVSGAPGQRVTISCTGSNSNIGAGYDVHWYQQLPGTAPKLLICGNSNRPSGVPDRFSGSKSGTSASLAITGLQAEDEADYYCQSYDSSLSGPNWVFGGGTKLTVL

SEQ ID NO: 386 - protein, 126 aa, Artificial Sequence
  Description of Artificial Sequence: Synthetic polypeptide
QVQLVQSGAEVKKPGASVKVSCKVSGYTLTEVSVHWVRQAPEKGLEWMGGFDPEDAETIYAQKFQGRVTMTEDTSTDTAYMELSSLRSEDTAVYFCATAPAVAGPFYYYYYGMDVWGQGTTVTVSS

SEQ ID NO: 387 - protein, 112 aa, Artificial Sequence
  Description of Artificial Sequence: Synthetic polypeptide
DIVMTQTPLSSPVTLGQPASISCRSSQSLVHSDGNTYLSWLQQRPGQPPRLIIYKVSNRFCGVPDRFSGSGAGTDFTLKISRVEAEDVGVYYCTQATQFPHTFGQGTKLEIK

SEQ ID NO: 388 - protein, 126 aa, Artificial Sequence
  Description of Artificial Sequence: Synthetic polypeptide
QVQLVQSGAEVKKPGASVKVSCKVSGYTLTEVSVHWVRQAPGKGLEWMGGFDPEDAKTIYAQKFQGRVTMTEDTSTDTAYMELSSLSSEDTAVYFCATAPAVAGPFYYYYYGMDVWGQGTTVTVSS

SEQ ID NO: 389 - protein, 112 aa, Artificial Sequence
  Description of Artificial Sequence: Synthetic polypeptide
DIVMTQTPLSSPVTLGQPASISCRSSQSLVHSDGNTYLSWLQQRPGQPPRLLIYKVSNRFSGVPDRFSGSGAGTDFTLKISRVEAEDVGVYYCTQATQFPHTFGQGTKLEIK

SEQ ID NO: 390 - protein, 126 aa, Artificial Sequence
  Description of Artificial Sequence: Synthetic polypeptide
QVQLVQSGAEVKKPGASVKVSCKVSGYSLIEVSVHWVRQAPGKGLEWMGGFDPENAETIYARGFRGRVTMTEDTSTDTAYMELSSLKYEDTAVYFCATAPAVAGPFYYYYYGMDVWGQGTTVTVSS

SEQ ID NO: 391 - protein, 112 aa, Artificial Sequence
  Description of Artificial Sequence: Synthetic polypeptide
DIVMTQTPLSSPVTLGQPASISCRSSQSLVHSDGNTYLSWLQQRPGQPPRLLIYKVSNRFSGVPDRFSGSGAGTEFTLKISRVEAEDVGVYYCTQATQFPHTFGQGTKLEIK

SEQ ID NO: 392 - protein, 117 aa, Artificial Sequence
  Description of Artificial Sequence: Synthetic polypeptide
QVQVVESGGGVVQPGRSLRLSCAASGFTFSGYGMHWVRQAPGKGLEWVAVIWYDGSNQYYADSVKGRFTISRDNSKNTLYLQMNSLRVEDTAVYHCVRETVDGMDVWGQGTTVTVSS

SEQ ID NO: 393 - protein, 107 aa, Artificial Sequence
  Description of Artificial Sequence: Synthetic polypeptide
NIQMTQSPSAMSASVGDSVTITCRARQDINNYLAWFQQKPGKVPKHLIYAASSLLSGVPSRFSGSGSGTEFTLTISSLQPEDFATYYCLQHNSYPYTFGQGTKLEIK

SEQ ID NO: 394 - protein, 126 aa, Artificial Sequence
  Description of Artificial Sequence: Synthetic polypeptide
QHQLVQSGAEVKKPGASVKVSCKVSGYTLVEVSVHWVRQAPGKGFEWMGGFDPENAATIYAQKFQGRVTMTEDTSTDTAYMELSSLRYEDTAVYFCATAPAVAGPLYYYYYGMDVWGQGTTVTVSS

SEQ ID NO: 395 - protein, 112 aa, Artificial Sequence; identical to SEQ ID NO: 391
  Description of Artificial Sequence: Synthetic polypeptide

SEQ ID NO: 396 - protein, 126 aa, Artificial Sequence
  Description of Artificial Sequence: Synthetic polypeptide
QVQLVQSGAEVKKPGASVKVSCKVSGYTLTEVSVHWVRQAPGKGLEWMGGFDPEDAETIYAQKFQGRVTMTEDTSTDTAYMELSSLRYEDTAVYFCATAPAVAGPFYYYYYGMDVWGQGTTVTVSS

SEQ ID NO: 397 - protein, 112 aa, Artificial Sequence; identical to SEQ ID NO: 391
  Description of Artificial Sequence: Synthetic polypeptide

SEQ ID NO: 398 - protein, 117 aa, Artificial Sequence
  Description of Artificial Sequence: Synthetic polypeptide
QVQVVESGGGVVQPGRSLRLSCAASGFTFSSYGMHWVRQAPGKGLEWVAVIWYDGSNKYYADSVKGRFTISRDNSKNTLYLQMNSLRVEDTAVYYCVRETVDGMDVWGQGTTVTVSS

SEQ ID NO: 399 - protein, 107 aa, Artificial Sequence; identical to SEQ ID NO: 393
  Description of Artificial Sequence: Synthetic polypeptide

SEQ ID NO: 400 - protein, 117 aa, Artificial Sequence; identical to SEQ ID NO: 398
  Description of Artificial Sequence: Synthetic polypeptide

SEQ ID NO: 401 - protein, 107 aa, Artificial Sequence; identical to SEQ ID NO: 393
  Description of Artificial Sequence: Synthetic polypeptide

SEQ ID NO: 402 - protein, 126 aa, Artificial Sequence
  Description of Artificial Sequence: Synthetic polypeptide
QVQLVQSGAEVKKPGASVKVSCKVSGYTLTEVSVHWVRQAPGKGLEWMGGFDPEDAETIYAQKFQGRVTMTEDTSTDTAYMELSSLRSEDTAVYFCATAPAVAGPFYNFYYGIDVWGQGTTVTVSS

SEQ ID NO: 403 - protein, 112 aa, Artificial Sequence; identical to SEQ ID NO: 389
  Description of Artificial Sequence: Synthetic polypeptide

SEQ ID NO: 404 - protein, 127 aa, Artificial Sequence
  Description of Artificial Sequence: Synthetic polypeptide
QVQLVQSGAEVKKPGASVKVSCKASGYTFTSYGISWVRQAPGQGLEWMGWISAYNGNTNYAQKLQGRVTMTTDTSTSTAYMELRSLRSDDTAVYYCARVPASYGDDDYYYYYGMDVWGQGTTVTVSS

SEQ ID NO: 405 - protein, 108 aa, Artificial Sequence
  Description of Artificial Sequence: Synthetic polypeptide
SYELTQPPSVSVSPGQTARITCSGDALPKQYAYWYQQKPGQAPVLVIYKDSERPSGIPERFSGSSSGTTVTLTISGVQAEDEADYYCQSADSSGTLWVFGGGTKLTVL

SEQ ID NO: 406 - protein, 124 aa, Artificial Sequence
  Description of Artificial Sequence: Synthetic polypeptide
EVQLLESGGGLVQPGGSLRLSCAASGFTFSNYAMSWVRQAPGKGLEWVSGISNSGGSTYYEDSVKGRFTISRDNSKNTLYLQMNSLRAEDTAVYYCAKVGEYCGDDCYRGLDYWGQGTLVTVSS

SEQ ID NO: 407 - protein, 110 aa, Artificial Sequence
  Description of Artificial Sequence: Synthetic polypeptide
QTVVTQEPSLTVSPGGTVTLTCGSSTGAVTSGHYPYWFQQKSGQAPRTLIYETNIKHSWTPARFSGSLLGGKAALTLSGAQPDDEADYYCLLSYSGARPVFGGGTKLTVL

SEQ ID NO: 408 - protein, 115 aa, Artificial Sequence; identical to SEQ ID NO: 214
  Description of Artificial Sequence: Synthetic polypeptide

SEQ ID NO: 409 - protein, 108 aa, Artificial Sequence; identical to SEQ ID NO: 215
  Description of Artificial Sequence: Synthetic polypeptide

SEQ ID NO: 410 - protein, 115 aa, Artificial Sequence
  Description of Artificial Sequence: Synthetic polypeptide
QVQLVESGGGLIQPGGSLRLSCAASGLTVSSNYMTWVRQAPGKGLEWVSVIYSGGSTFYADSVKGRFTISRDNSKNTLYLQMNSLRAEDTAVYYCARETYGMDVWGQGTTVTVSS

SEQ ID NO: 411 - protein, 108 aa, Artificial Sequence
  Description of Artificial Sequence: Synthetic polypeptide
EIVLTQSPGTLSLSPGERATLSCRASQSVSSNYLAWYQQKPGQAPRLLIYGASSRATGIPDRFSGSGSGTDFTLTISRLEPEDFAVYYCQQYGSSPWTFGQGTKVEIK

SEQ ID NO: 412 - protein, 122 aa, Artificial Sequence
  Description of Artificial Sequence: Synthetic polypeptide
QLQLQESGPGLVKPSETLSLTCTVSGGSISRSDYYWGWIRQPPGKGLEWIGTIYYSGSTYYNPSLKSRVTISVDTSKNQFSLKLGSVTAADTAVYYCARQARTDASTYGHNFDSWGQGTLVT

SEQ ID NO: 413 - protein, 110 aa, Artificial Sequence
  Description of Artificial Sequence: Synthetic polypeptide
QSALTQPASVSGSPGQSITISCTGTSSDVGSYNLVSWYQQHPGKAPKLMIYEGSKRPSGVSSRFSGSKSGNTASLTISGLQGEDEADYYCCSYAGSSTWVFAGGTKLTVL

SEQ ID NO: 414 - protein, 125 aa, Artificial Sequence
  Description of Artificial Sequence: Synthetic polypeptide
QLQLQESGPGLVKPSETLSLTCTVSGGSISRSDFYWGWIRQPPGKGLEWIGTIYYSGSTYYNPSLKSRVTISVDTSKNQFSLKLDSVTAADTAVYYCARQARTDGSTYGHNFDYWGQGTLVTVSS

SEQ ID NO: 415 - protein, 110 aa, Artificial Sequence
  Description of Artificial Sequence: Synthetic polypeptide
QSALTQPASVSGSPGQSITISCTGTSSDVGSYNLVSWYQQHPGKAPKLMIYEGSKRPSGVSSRFSGSKFGNTASLTIYGLQGEDEADYYCCSYAGSITWVFGGGTKLTVL

SEQ ID NO: 416 - protein, 121 aa, Artificial Sequence
  Description of Artificial Sequence: Synthetic polypeptide
QVQLVQSGAEVKKPGASVKVSCKASGYTFTGYYMHWVRQAPGQGLEWMGWINPNSGGTNYAQKFQGWVTMTRDTSISTAYMELSRLRSDDTAVYYCARESHGGVWSAPGYYYGMDVWGQGT

SEQ ID NO: 417 - protein, 110 aa, Artificial Sequence
  Description of Artificial Sequence: Synthetic polypeptide
QSVLTQPASVSGSPGQSITISCTGTSSDVGGYNYVSWYQQHPGKAPKLMIYDVSNRPSGVSNRFSGSKSGNTASLTISGLQAEDEADYYCSSYTNSSAVVFGGGTKLTVL

SEQ ID NO: 418 - protein, 119 aa, Artificial Sequence
  Description of Artificial Sequence: Synthetic polypeptide
EVQLVESGGGLVKPGGSLRLSCAASGFTFSSYSMNWVRQAPGKGLEWVSSISRDSKYIYYAESVKGRFTISRDNAKNSLYLQMNSLIVEDTAVYYCARDDGIAAASDYWGQGTLVTVSS

SEQ ID NO: 419 - protein, 109 aa, Artificial Sequence
  Description of Artificial Sequence: Synthetic polypeptide
EIVLTQSPGTLSLSPGERATLSCRASQSVSSSYLAWYQQKPGQAPRLLIYGASRRATGIPDRFSGSGSGTDFTLTISRLEPEDFAVYYCQQYGSSPLLTFGGGTKVEIK

SEQ ID NO: 420 - protein, 125 aa, Artificial Sequence
  Description of Artificial Sequence: Synthetic polypeptide
QVQLQQWGAGLLKPSETLSRTCAVYGGSFSGYYWSWIRQSPGKGLEWIGEINDSGSTNYNPSLKSRVTISVDTSKNQFSLRLSSVTAADTAVYYCARGHTQEKWELREGYYFDYWDQGTLVTVSS

SEQ ID NO: 421 - protein, 112 aa, Artificial Sequence
  Description of Artificial Sequence: Synthetic polypeptide
QSALTQPASVSGSPGQSITISCTGTSSDVGDYNYVSWYQQHPGKAPKLMIYDVSNRPSGVSNRFSGSKSGNTASLTISGLQAEDEADYYCSSYASGSTLYYVFGTGTKVTVL

SEQ ID NO: 422 - protein, 122 aa, Artificial Sequence
  Description of Artificial Sequence: Synthetic polypeptide
EVQLLESGGGLVKPGGSLRLSCAASGFTFSSYNMNWVRQAPGKGLEWVSSISSSSSHIYYADSVKGRFTISRDNAKNSLYLQMNSLRAEDTAVYYCARERGYHGGKTSPFLGGQGTLVTVSS

SEQ ID NO: 423 - protein, 111 aa, Artificial Sequence; identical to SEQ ID NO: 219
  Description of Artificial Sequence: Synthetic polypeptide

SEQ ID NO: 424 - protein, 129 aa, Artificial Sequence
  Description of Artificial Sequence: Synthetic polypeptide
QVQLVESGAEVKKPGASVKVSCKASGYTFTAYYMHWVRQAPGQGLEWMGWINPNSGGTNYAQKFQGRVTMTRDTSISTAYMELSRLRSDDTAVYYCARPPRDYYDSSGYQIRDDHFDYWGQGTLVTVSS

SEQ ID NO: 425 - protein, 107 aa, Artificial Sequence
  Description of Artificial Sequence: Synthetic polypeptide
EIVLTQSPATLSLSPGERATLSCRASQSVSSYLAWYQQKPGQAPRLLIYDASNRATGIPARFSGSGPGTDFTLTISSLEPEDFAVYYCQQRSNCLFTFGPGTKVDIK

SEQ ID NO: 426 - protein, 128 aa, Artificial Sequence
  Description of Artificial Sequence: Synthetic polypeptide
EVQLVQSGAEVKKPGASVRVSCKASGYTFTSYDINWVRQATGQGLEWMGWMNPNSGNTGYAQKFQGRVTMTRNTSISTVYMELSSLRSEDTAVYYCARFPKVPAAIFPGDYYYGMDVWGQGTTVTVSS

SEQ ID NO: 427 - protein, 110 aa, Artificial Sequence
  Description of Artificial Sequence: Synthetic polypeptide
QSALTQPASVSGSPGQSITISCTGTSSDVGSYNLVSWYQQHPGKAPKLMIYEVSKRPSGVSNRFSGSKSGNTASLTISGLQAEDEADYYCCSYAGSSTLVFGGGTKLTVL

SEQ ID NO: 428 - protein, 120 aa, Artificial Sequence
  Description of Artificial Sequence: Synthetic polypeptide
QVQLVESGGGVVQPGRSLRLSCAASGFTFSSYAMHWVRQAPGKGLEWVAVIWYDGSNKHYADSVKGRFTISRDNSKNTLYLQMNSLRAEDTAMYYCARDEGSLTTTFDYWGQGTLVTVSS

SEQ ID NO: 429 - protein, 108 aa, Artificial Sequence
  Description of Artificial Sequence: Synthetic polypeptide
DIQMTQSPSSLSASVGDRVTISCRASQSISSYLNWFQQKPGKAPKLLIYAASSLQSGVPSRFSGSGSGTDFTLTISTLQPEDFATYYCQQSYGTPPWTFGQGTKVEIK

SEQ ID NO: 430 - protein, 128 aa, Artificial Sequence
  Description of Artificial Sequence: Synthetic polypeptide
EVQLVESGGGLVQPGGSLRLSCAASGFTFSTYDMSWARQAPGKGLEWVANIKQDGSEKYYVDSVKGRFTISRDNAKNSLYLQMNSLRAEDTAVYYCARDTIPFWSGYYTSPDYYFDYWGQGTLVTVSS

SEQ ID NO: 431 - protein, 111 aa, Artificial Sequence
  Description of Artificial Sequence: Synthetic polypeptide
QSALTQPPSVSGAPGQRVTISCTGSSSNIGAGYDVHWYQQLPGTAPKLLIYGNSNRPSGVPDRFSGSKSGTSASLAITGLQAEDEADYYCQSYDSSLSGVVFGGGTKLTVL

SEQ ID NO: 432 - protein, 122 aa, Artificial Sequence
  Description of Artificial Sequence: Synthetic polypeptide
QVQLQESGPGLVKPSQTLSLTCTVSGGSISSGGYYWSWIRQHPGKGLEWIGYIYYSGTTYYNPSLKSRVTISVDTSKNQFSLKLSSVTAADTAVYYCASSRYDFWSGSFDYWGQGTLVTVSS

SEQ ID NO: 433 - protein, 110 aa, Artificial Sequence
  Description of Artificial Sequence: Synthetic polypeptide
QSALTQPPSASGSPGQSVTISCTGTSSDVGGYNYVSWYQQHPGKAPKLMIYEVSKRPSGVPDRFSGSKSGNTASLTVSGLQAEDEADYYCSSYAGSNNWVFGGGTKLTVL

SEQ ID NO: 434 - protein, 130 aa, Artificial Sequence
  Description of Artificial Sequence: Synthetic polypeptide
QVQLVQSGAEVKKPGASVKVSCKTSGYIFTDYSMHWVRQAPGQGLEWMGWVNPNSGGTNYAQKFQGWVTMARDTSITTVYMELSRLRSDDTAVYYCARGPLPHRLVYDFWSGFHDAFDIWGQGTMVTVSS

SEQ ID NO: 435 - protein, 110 aa, Artificial Sequence
  Description of Artificial Sequence: Synthetic polypeptide
QSALTQPASVSGSPGQSITISCTGTSSDVGGYNFVSWYQQHPGKAPKLMIYEVSDRPSGVSNRFSGSKSGNTASLTISGLQAEDEADYYCSSYTSSSTWVFGGGTKLTVL

SEQ ID NO: 436 - protein, 115 aa, Artificial Sequence
  Description of Artificial Sequence: Synthetic polypeptide
QVQLVESGGGVVQPGRSLRLSCAASGFTFSNYGMHWVRQAPGKGLEWVAVIRYNGNNIYYADFVKGRFTISRDNSKNTLYLQMNSLRGEDTAVYYCAREGDGPDAFDIWGQGTMV

SEQ ID NO: 437 - protein, 107 aa, Artificial Sequence
  Description of Artificial Sequence: Synthetic polypeptide
DIQMTQSPSTLSASVGDRVTITCRASQSISSWLAWYQQKPGKAPKLLIYEASSLKSGVPSRFSGSGSGTEFTLTISSLQPDDFATYYCQQYNNYGITFGQGTRLEIK

SEQ ID NO: 438 - protein, 115 aa, Artificial Sequence
  Description of Artificial Sequence: Synthetic polypeptide
EVQLVESGGGLIQPGGSLRLSCAASGLTVSSNYMSWVRQAPGKGLEWVSVIYSGGSTYYADSVRGRFTISRDNSENTLYLQMNSLRAEDTAVYYCARVGDWYFSWGQGTLVTVSS

SEQ ID NO: 439 - protein, 108 aa, Artificial Sequence
  Description of Artificial Sequence: Synthetic polypeptide
DIQLTQSPSFLSASVGDRVTITCRASQGVGSYLAWYQQKPGKAPNLLIYAASTLQSGVPSRFSGSGSGTEFTLKITSLQPEDIATYYCQQLNSYPPLTFGGGTKVEIK

SEQ ID NO: 440 - protein, 128 aa, Artificial Sequence
  Description of Artificial Sequence: Synthetic polypeptide
QVQLQESGPGLVKPSETLSLTCTFSGGSISSYSWNWIRQPPGKGLEWIGYIYTSGSTNYNPSLKSRVTMSVDTSKNQFSLKLNSVTAADAAVYFCARGLFYNSGGYYSSNYYYYIDVWGKGTTVTVSS

SEQ ID NO: 441 - protein, 109 aa, Artificial Sequence
  Description of Artificial Sequence: Synthetic polypeptide
EIVLTQSPGTLSLSPGERVTLSCRASQSITSTYLTWYQQKPGQAPRLLIYGASNRATGIPDRFSSSGSGTDFTLTISRLEPEDFAVYYCQHYDRSPLCSFGQGTKLEIK

SEQ ID NO: 442 - protein, 123 aa, Artificial Sequence
  Description of Artificial Sequence: Synthetic polypeptide
EVQLVQSAAEVKKPGESLRISCKGSGYSFTNYWINWVRQMPGKGLEWMGRIDPSDSYTNYSPSFQGHVTISADKSISTAYLQWSSLKASDTAMYYCARLNTDLRSRFGELYYYFDYWGQGTLV

SEQ ID NO: 443 - protein, 109 aa, Artificial Sequence
  Description of Artificial Sequence: Synthetic polypeptide
EIVLTQSPGILSLSPGERATLSCRASQSVSSSYLAWYQQKPGQAPRLLIYGASSRAAGIPDRFSGSGSGTDFTLTISRLEPEDSAVYYCQQYGSSLTWTFGQGTKVEIK

SEQ ID NO: 444 - protein, 121 aa, Artificial Sequence
  Description of Artificial Sequence: Synthetic polypeptide
QVQLVQSGAEVKKPGASVKVSCKASGYTFTTYYLHWVRQAPGQGLEWMGIIDPSGGSTSYAQKFQGRVTMTKDTSTSTVYMELSSLRSEDTAVYYCARVGRGFSYGYFDYWGQGALVTVSS

SEQ ID NO: 445 - protein, 108 aa, Artificial Sequence
  Description of Artificial Sequence: Synthetic polypeptide
DIQMTQSPSSLSASVGDRVTITCQASQDITNHLNWYQQKPGKAPKLLIYYASNLETGVPSRFSGIGSGTDFTFTISSLQPEDIATYYCQQYDNLPPLTFGGGTKVEIK

SEQ ID NO: 446 - protein, 127 aa, Artificial Sequence
  Description of Artificial Sequence: Synthetic polypeptide
QVQLVQSGAEVKKPGSSVKVSCKASGGTFNSYAISWVRQAPGQGLEWMGGIIPIFGTANYAQKFQGRVTITADESTSTAYMELSSLRSEDTAVYYCARVGAEWPRDHKYYYYGMDVWGQGTTVTVSS

SEQ ID NO: 447 - protein, 112 aa, Artificial Sequence
  Description of Artificial Sequence: Synthetic polypeptide
DIVMTQSPLSLPVTPGEPASISCRSSQSLLHSNGYNYLDWYLQKPGQSPQLLIYLGSNRASGVPDRFSGSGSGTDFTLKISRVEAEDVGVYYCMQALQTPLTFGGGTKVEIK

SEQ ID NO: 448 - protein, 120 aa, Artificial Sequence
  Description of Artificial Sequence: Synthetic polypeptide
QVQLVESGGGLVQPGGSLRLSCAASGFTFSNYDMHWVRQATGRGLEWVSTIGTAGDTYYPGSVKGRFTISRENAKNSLYLQMNSLRAGDTAVYYCARVKYGGYVGYFDYWGQGTLVTVSS

SEQ ID NO: 449 - protein, 108 aa, Artificial Sequence
  Description of Artificial Sequence: Synthetic polypeptide
DIQMTQSPSSLSASVGDRVTITCRASQSISSYLNWYQQKPGKAPKLLIYAASSLQSGVPSRFSGSGSGTDFTLTISSLQPEDFATYYCQQSYSTPELTFGGGTKVEIK

SEQ ID NO: 450 - protein, 117 aa, Artificial Sequence
  Description of Artificial Sequence: Synthetic polypeptide
EVQLVESGGGLVQPGGSLRLSCAASGFTVSSNYMSWVRQAPGKGLEWVSLIYSGGTTYYADSVKGRFTISRDNSKNTLYLQMNSLRAEDTAVYYCARETLGRGGDYWGQGTLVTVSS

SEQ ID NO: 451 - protein, 107 aa, Artificial Sequence
  Description of Artificial Sequence: Synthetic polypeptide
DIQMTQSPSSLSASVGDRVTITCQASQDISNYLNWYQQKPGKAPKLLIYDASNLETGVPSRFSGSGSGTDFTFTISSLQPEDIATYYCQQYDNLPRSFGQGTKLEIK

SEQ ID NO: 452 - protein, 127 aa, Artificial Sequence
  Description of Artificial Sequence: Synthetic polypeptide
EVQLVESGGGLVQPGRSLRLSCAASGFTFDDYAMHWVRQAPGKGLEWVSGVSWNSGTIGYADSVKGRFTISRDNAKNSLYLQMNSLRAEDTALYYCAKIADIVRAYDFWSGQHFDAFDIWGQGTMVT

SEQ ID NO: 453 - protein, 108 aa, Artificial Sequence
  Description of Artificial Sequence: Synthetic polypeptide
QSVLTQPPSASGTPGQRVTISCSGSSSNIGSNTVNWYQQLPGTAPKLLIYSNNQRPSGVPDRFSGSKSGTSASLAISGLQSEDEADYYCAAWDDSLVVFGGGTKLTVL

SEQ ID NO: 454 - protein, 121 aa, Artificial Sequence
  Description of Artificial Sequence: Synthetic polypeptide
EVQLVESGGGLVQPGRSLRLSCAASGFTFDDYAMHWVRQAPGKGLEWVSIISWNSDNIGYADSVKGRFTISRDNARNSLYLQMNSLRVEDTALYYCAKDKGSGSGYGMDVWGRGTTVTVSS

SEQ ID NO: 455 - protein, 107 aa, Artificial Sequence
  Description of Artificial Sequence: Synthetic polypeptide
DIQMTQSPSTLSASVGDRVTITCRASQSISSWLAWYQQKPGKAPNLLIYTASNLESGVPSRYSGSGSGTEFTLSISSLQPEDSATYFCQRYNSYPYSFGQGTKLEIK

SEQ ID NO: 456 - protein, 120 aa, Artificial Sequence
  Description of Artificial Sequence: Synthetic polypeptide
QLQLQESGPGLVKPSETLSLTCTVSGGSISSSYYYWGWIRQPPGKGLEWIGSIYYSGSTYYNPSLKSRVTISVDTSKNQFSLTLSSVTAADTAVYYCATGGRFWGWFDPWGQGTLVTVSS

SEQ ID NO: 457 - protein, 109 aa, Artificial Sequence
  Description of Artificial Sequence: Synthetic polypeptide
DIQMTQSPSSLSASVGDRVTITCQASQDISNYLNWYQQKPGKAPKLLIYDASNLETGVPSRFSGSGSGTDFTFTISSLQPEDIATYYCQQYDNLPPKLTFGGGTKVEIK

SEQ ID NO: 458 - protein, 120 aa, Artificial Sequence
  Description of Artificial Sequence: Synthetic polypeptide
EVQLVQSGAEVKKPGESLKISCKGSGYSFISYWIGWVRQMPGKGLEWMGIIYPGDSDTRYSPSFQGQVTISADKSINTAYLQWSSLKASDTAMYYCARRVTIPNGWFDPWGQGTLVTVSS

SEQ ID NO: 459 - protein, 110 aa, Artificial Sequence; identical to SEQ ID NO: 181
  Description of Artificial Sequence: Synthetic polypeptide

SEQ ID NO: 460 - protein, 125 aa, Artificial Sequence
  Description of Artificial Sequence: Synthetic polypeptide
QVQLVQSGAEVKKPGSSVKVSCKASGGTFSSYAINWVRQAPGQGLEWMGGIIPIFGTANYAQKFQGRVTITADESTSTAYMELSSLRSEDTALYYCARNRAVSEREDYYYGMDVWGQGTTVTVSS

SEQ ID NO: 461 - protein, 107 aa, Artificial Sequence
  Description of Artificial Sequence: Synthetic polypeptide
DIQMTQSPSSVSASVGDRVTITCRASQGISRWLAWYQQKPGKAPKLLIYAAFSLQSGVPSRFSGSGSGTDFTLTISSLQPEDFATYYCQQANSFPLTFGGGTKVEIK

SEQ ID NO: 462 - protein, 130 aa, Artificial Sequence
  Description of Artificial Sequence: Synthetic polypeptide
QVQLVQSGAEVKKPGASVKVSCKASGYIFTDYSMHWVRQAPGQGLEWIGWVNPNSGGTNYAQKFQGWVTMARDTSITTVYMELSRLKSDDTAVYFCARGPLFHRLVYDFWSGYHDGFDMWGQGTMVTVSS

SEQ ID NO: 463 - protein, 110 aa, Artificial Sequence
  Description of Artificial Sequence: Synthetic polypeptide
QSVLTQPASVSGSPGQSITISCTGTSSDVGGYKFVSWYQQHPGKAPKLMIYEVSNRPSGVSNRFSGSKSGNTASLTISGLQAEDEADYYCNSYTSSSTWVFGGGTKLTVL

SEQ ID NO: 464 - protein, 115 aa, Artificial Sequence
  Description of Artificial Sequence: Synthetic polypeptide
EVQLVESGGGLIQPGGSLRLSCAASGLTVSRNYMNWVRQAPGKGLEWVSVMYSGGSTFYADSVKGRFTISRDNSKNTLYLQMNSLRAEDTAVYYCARESYGMDVWGQGTTVTVSS

SEQ ID NO: 465 - protein, 108 aa, Artificial Sequence
  Description of Artificial Sequence: Synthetic polypeptide
EIVLTQSPGTLSLSPGERATLSCRASQSFSSTYLAWYQQKPGQAPRLLIYGASSRATGIPDRFSGSGSGTDFTLTISRLEPEDFAVYYCQQYVTSPWTFGQGTKVEIK

SEQ ID NO: 466 - protein, 125 aa, Artificial Sequence; identical to SEQ ID NO: 420
  Description of Artificial Sequence: Synthetic polypeptide

SEQ ID NO: 467 - protein, 112 aa, Artificial Sequence; identical to SEQ ID NO: 421
  Description of Artificial Sequence: Synthetic polypeptide

SEQ ID NO: 468 - protein, 124 aa, Artificial Sequence
  Description of Artificial Sequence: Synthetic polypeptide
QVQLVESGGGVVQPGRSLRLSCAASGFPFSIYGMHWVRQAPGKGLEWVAVISYDGGNKYYADSVKGRFTISRDNSKNTLYLQMNSLRAEDTAVYYCAKEGRPSDIVVVVAFDYWGQGTLVTVSS

SEQ ID NO: 469 - protein, 107 aa, Artificial Sequence
  Description of Artificial Sequence: Synthetic polypeptide
DIQMTQSPSSLSASVGDRVTITCRASQSISSYLNWYQQKPGKAPKLLIYAASSLQSGVPSRFSGSVSGTDFTLTISSLLPEDFATYYCQQSYSTPRTFGQGTKVEIK

SEQ ID NO: 470 - protein, 123 aa, Artificial Sequence
  Description of Artificial Sequence: Synthetic polypeptide
QVQLVQSGPEVKKPGTSVKVSCKASGFTFTSSAVQWVRQARGQRLEWIGWIVVGSGNTNYAQKFQERVTITRDMSTSTAYMELSSLRSEDTAVYYCAAPHCSGGSCYDAFDIWGQGTMVTVSS

SEQ ID NO: 471 - protein, 108 aa, Artificial Sequence; identical to SEQ ID NO: 177
  Description of Artificial Sequence: Synthetic polypeptide

SEQ ID NO: 472 - protein, 123 aa, Artificial Sequence; identical to SEQ ID NO: 470
  Description of Artificial Sequence: Synthetic polypeptide

SEQ ID NO: 473 - protein, 108 aa, Artificial Sequence; identical to SEQ ID NO: 177
  Description of Artificial Sequence: Synthetic polypeptide

SEQ ID NO: 474 - protein, 131 aa, Artificial Sequence
  Description of Artificial Sequence: Synthetic polypeptide
EVQLVESGGGLIQPGGSLRLSCAASGFTVSSNYMSWVRQAPGKGLEWVSVIYSGGSTYYADSVKGRFTISRDNSKNTLYLQMNSLRAEDTAVYYCAREGDVEGYYDFWSGYSRDRYYFDYWGQGTLVTVSS

SEQ ID NO: 475 - protein, 110 aa, Artificial Sequence; identical to SEQ ID NO: 207
  Description of Artificial Sequence: Synthetic polypeptide

SEQ ID NO: 476 - protein, 122 aa, Artificial Sequence
  Description of Artificial Sequence: Synthetic polypeptide
QVQLVQSGAEVKKPGASVKVSCKASGYTFTGYYMHWVRQAPGQGLEWMGWINPNSGGTNYAQKFQGRVTMTRETSISTVYMELSRLRSDDTAVYYCARDLGWSRLHGAFDIWGQGTMVTVSS

SEQ ID NO: 477 - protein, 110 aa, Artificial Sequence
  Description of Artificial Sequence: Synthetic polypeptide
QSALTQPPSASGSPGQSVTISCTGTSSDVGGYNYVSWYQQRPGKAPKLMIDEVTKRPSGVPDRFSGSKSGNTASLTVSGLQAEDEADYYCSSYAGSNNWVFGGGTKLTVL

SEQ ID NO: 478 - protein, 125 aa, Artificial Sequence
  Description of Artificial Sequence: Synthetic polypeptide
QVQLQESGPGLVKPSGTLSLTCTVSSDSVSSYYWNWIRQTTGKGMEWIGRIDTGGRTNYNPSLSSRVAMSMATSKNQFSLKLSSVTAADTAVYFCARGLSYYPLYGSHINYIDYWGQGTLVTVSS

SEQ ID NO: 479 - protein, 110 aa, Artificial Sequence
  Description of Artificial Sequence: Synthetic polypeptide
QSVLTQPPSASGTPGQRVTISCSGISSNLGSNTVNWFQQLPGTAPKLLIYNSNRRPSGVPDRFSGSKSGTSASLAISGLQSEDEGDYYCAEWDDSLSTWVFGGGTHLTVL

SEQ ID NO: 480 - protein, 125 aa, Artificial Sequence; identical to SEQ ID NO: 478
  Description of Artificial Sequence: Synthetic polypeptide

SEQ ID NO: 481 - protein, 110 aa, Artificial Sequence; identical to SEQ ID NO: 479
  Description of Artificial Sequence: Synthetic polypeptide

SEQ ID NO: 482 - protein, 121 aa, Artificial Sequence
  Description of Artificial Sequence: Synthetic polypeptide
QVQLQESGPGLVKPSGTLSLTCAVSGGSISSSNWWSWVRQPPGKGLEWIGEIYHSGSTNYNPSLKSRVTISVDKSKNQFSLKLSSVTAADTAVYYCATHLRLGELRGVDYWGQGTLVTVSS

SEQ ID NO: 483 - protein, 108 aa, Artificial Sequence
  Description of Artificial Sequence: Synthetic polypeptide
EIVLTQSPATLSLSPGERATLSCRASQSVSSYLAWYQQKPGQAPRLLIYDASNRATGIPARFSGSGSGTDFSLTISSLEPEDFAVYYCQQRSNWPPWTFGQGTKVEIK

SEQ ID NO: 484 - protein, 122 aa, Artificial Sequence
  Description of Artificial Sequence: Synthetic polypeptide
EVQLLESGGGLVKPGGSLRLSCAASGFTFSSYSMNWVRQAPGKGLEWVSSISSSSSYIYYADSVKGRFTISRDNAKNSLYLQMNSLRAEDTAVYYCARERGYYGGKTPPFLGGQGTLVTVSS

SEQ ID NO: 485 - protein, 111 aa, Artificial Sequence; identical to SEQ ID NO: 219
  Description of Artificial Sequence: Synthetic polypeptide

SEQ ID NO: 486 - protein, 138 aa, Artificial Sequence; identical to SEQ ID NO: 106
  Description of Artificial Sequence: Synthetic polypeptide

SEQ ID NO: 487 - protein, 107 aa, Artificial Sequence; identical to SEQ ID NO: 107
  Description of Artificial Sequence: Synthetic polypeptide

SEQ ID NO: 488 - protein, 122 aa, Artificial Sequence
  Description of Artificial Sequence: Synthetic polypeptide
QVQLVQSGAEVKKPGASVKVSCKASGYTFTGYYMHWVRQAPGQGLEWMGWINPNSGGTNYAQKFQGRVTMTRDTSIITAYMELSRLRSDDTAVYYCARAPPFYDFWSGIDYWGQGTLVTVSS

SEQ ID NO: 489 - protein, 109 aa, Artificial Sequence
  Description of Artificial Sequence: Synthetic polypeptide
QSALTQPASVSGSPGQSITISCTGTSSDVGGYNYVSWYQQHPGKAPKLMIYDVSNRPSGVSNRFSGSKSGNTASLTISGLQAEDEADYYCSSYTSSSTLVFGGGTKLTV

SEQ ID NO: 490 - protein, 125 aa, Artificial Sequence
  Description of Artificial Sequence: Synthetic polypeptide
QVQLVQSGAEVKKPGSSVKVSCKASGGTFSTYAISWVRQAPGQGLEWMGGIIPIFGTANYAQKFQGRVTITADESTSTAYMELSSLRSEDTAVYYCARDLRNCSSTSCYYWFDPWGQGTLVTVSS

SEQ ID NO: 491 - protein, 106 aa, Artificial Sequence
  Description of Artificial Sequence: Synthetic polypeptide
DIQMTQSPSSLSASVGDRVTITCRASQSISSYLNWYQQKPGKAPKLLIYVASSLQSGVPSRFSGSGSGTDFTLTISSLQPEDFATYYCQQSYSTRTFGQGTKVEIK

SEQ ID NO: 492 - protein, 138 aa, Artificial Sequence; identical to SEQ ID NO: 106
  Description of Artificial Sequence: Synthetic polypeptide

SEQ ID NO: 493 - protein, 107 aa, Artificial Sequence; identical to SEQ ID NO: 107
  Description of Artificial Sequence: Synthetic polypeptide

SEQ ID NO: 494 - protein, 128 aa, Artificial Sequence; identical to SEQ ID NO: 94
  Description of Artificial Sequence: Synthetic polypeptide

SEQ ID NO: 495 - protein, 107 aa, Artificial Sequence
  Description of Artificial Sequence: Synthetic polypeptide
DIQMTQSPSSLSASVGDRVTITCQASQDISNYLNWYQQKPGKAPKLLIYDASNLETGVPSRFSGSGSGTDFTFTISSLQPEDIATYYCQQYDNLPITFGQGTRLEIK

SEQ ID NO: 496 - protein, 130 aa, Artificial Sequence
  Description of Artificial Sequence: Synthetic polypeptide
QVQLVQSGAEVKKPGASVKVSCKASGYTFTGYFMHWVRQAPGQGLEWMGWINPNSGGTNYAQKFQGRVTMTRDTSITTAYMELSRLRSDDTAVYYCARDDTLLRYSDWLPTTSFGGMDVWGQGTTVTVSS

SEQ ID NO: 497 - protein, 110 aa, Artificial Sequence
  Description of Artificial Sequence: Synthetic polypeptide
QSALTQPASVSGSPGQSITISCTGTSSDVGGYNYVSWYQQHPGKAPKVMIYDVSNRPSGVSNRFSGSKSGNTASLTISGLQAEDEADYYCSSYTSSSTNVFGTGTKVTVL

SEQ ID NO: 498 - protein, 121 aa, Artificial Sequence
  Description of Artificial Sequence: Synthetic polypeptide
QVQLVESGGGVVQPGRSLRLSCAASGFTFSSYGMHWVRQAPGKGLEWVAVIRYDGSNKYYADSVKGRFTISRDNSKNKLYLQMNSLRAEDTAVYYCAREDYYDSSGSLDYWGQGTLVTVSS

SEQ ID NO: 499 - protein, 109 aa, Artificial Sequence
  Description of Artificial Sequence: Synthetic polypeptide
QSALTQPRSVSGSPGQSVTISCTGTSSDVGGYNYVSWYQQHPGKAPKLMIYDVSKRPSGVPDRFSGSKSGNTASLTISGLQAEDEADYYCCSYAGSPWVFGGGTKLTVL

SEQ ID NO: 500 - protein, 123 aa, Artificial Sequence; identical to SEQ ID NO: 470
  Description of Artificial Sequence: Synthetic polypeptide

SEQ ID NO: 501 - protein, 108 aa, Artificial Sequence
  Description of Artificial Sequence: Synthetic polypeptide
EIVLTQSPGTLSLSPGERATLSCRASQSVSSSYLAWYQQKPGQAPRLLIYGASSRATGIPDRFSGSGSGTDFTLTISRLEPEDFAVYYCQQYGSSPYTFGQGTKLEIK

SEQ ID NO: 502 - protein, 124 aa, Artificial Sequence
  Description of Artificial Sequence: Synthetic polypeptide
QVQLVQSGAEVKKPGASVKVSCKASGYTFTGYFLHWVRQAPGQGLEWVGWISPISGGTNYALKFQGRVTMTRDTSSTTAYMDLSRLRSDDTAVYYCAREALGYGDFPHDGFDLWGKGTMVTVSS

SEQ ID NO: 503 - protein, 110 aa, Artificial Sequence
  Description of Artificial Sequence: Synthetic polypeptide
QSALTQPASVSGSPGQSITISCTGTSSDVGYYNFVSWYQQHPGKAPKLMIFDVSNRPSGVSNRFSGSKSGNTASLTISGLQAEDEADYYCSSYTSSSARVFGGGTKVTVL

SEQ ID NO: 504 - protein, 129 aa, Artificial Sequence
  Description of Artificial Sequence: Synthetic polypeptide
QVQLVESGGGVVQPGRSLRLSCAASGFTFSSYTMHWVRQAPGKGLEWVAVISYDGSNKYYADSVKGRFTISRDNSKNTLYLQMNSLRAEDTAVYYCARGPRGYYDFWSGYENEYYFDYWGQGTLVTVSS

SEQ ID NO: 505 - protein, 107 aa, Artificial Sequence
  Description of Artificial Sequence: Synthetic polypeptide
DIQMTQSPSSLSASVGDRVTITCRASQGISNYLAWYQQKPGKVPKLLIYAASTLQSGVPSRFSGSGSGTDFTLTISSLQPEDVATYYCQKYNSAPLTFGQGTRLEIK

SEQ ID NO: 506 - protein, 128 aa, Artificial Sequence
  Description of Artificial Sequence: Synthetic polypeptide
QVQLVESGGGVVQPGRSLRLSCAASGFTFSSYAMHWVRQAPGKGLEWVAVISYDGSNKYYADSVKGRFTISRDNSKNTLYLQMNSLRAEDTAVYYCAREGAGPYYYDSSGYYTLFDDWGQGTLVTVSS

SEQ ID NO: 507 - protein, 106 aa, Artificial Sequence
  Description of Artificial Sequence: Synthetic polypeptide
EIVLTQSPATLSLSPGERATLSCRASQSVSSYLAWYQQKPGQAPRLLIYDASNRATGIPARFSGSGSGTDFTLTISSLEPEDFAVYYCQQRSNWPTFGQGTRLEIK

SEQ ID NO: 508 - protein, 127 aa, Artificial Sequence
  Description of Artificial Sequence: Synthetic polypeptide
QVQLVQSGAEVKKPGSSVRVSCKASGGTFSTYPISWVRQAPGQGLEWMGGIIPIFGTAKSAQKFQGRVTITADEFTSTAYMEMSSLRSEDTAMYYCAREGRRYGSGWYISTGYFDYWGQGTLVTVSS

SEQ ID NO: 509 - protein, 110 aa, Artificial Sequence
  Description of Artificial Sequence: Synthetic polypeptide
QLVLTQPASVSGSPGQSIIVSCTGTSSDVGGYKFVSWYQQHPGKAPRVMIYDVSNRPSGVSNRFSGSKSGNTASLTISGLQADDEADYYCSSYTNSSTVVFGGGTKVTVL

SEQ ID NO: 510 - protein, 118 aa, Artificial Sequence
  Description of Artificial Sequence: Synthetic polypeptide
QVQLVQSGGGVVQPGRSLRLSCVASEFTFNTYGMHWVRQAPGKGLEWVAAISYDGTKKFYADSLKGRFTISRDNSKNTLYLQMNSLRSEDTAVYYCARSGDSDAFDIWGQGTMVTVSS

SEQ ID NO: 511 - protein, 106 aa, Artificial Sequence
  Description of Artificial Sequence: Synthetic polypeptide
SYELTQPPSVSVSPGQTATITCSGDELGDKFAFWYQQKPGQSPVLVIYQDSKRPSGIPERFSGSNSGNTATLTISGTQALDEADYYCQAWDSNSYVFGTGTKVTVL

SEQ ID NO: 512 - protein, 120 aa, Artificial Sequence
  Description of Artificial Sequence: Synthetic polypeptide
EVQLVQSGAEVKEPGSSVKVSCKASGGTFGSYAINWVRQAPGQRLEWMGWIDAANGNTKYSQKFQGRVTITGDTSASTAYMELSSLRSEDTAVYYCARDRWMTTRAFDIWGQGTMVTVSS

SEQ ID NO: 513 - protein, 110 aa, Artificial Sequence
  Description of Artificial Sequence: Synthetic polypeptide
QPVLTQPPSASGTPGQRVTISCSGSSSNIGSNYVFWYQQLPGMAPKLLISRNNQRPSGVPDRFSGSKSGTSASLAISGPQSEDEADYYCAAWDDSLRGPVFGGGTRVTVL

SEQ ID NO: 514 - protein, 122 aa, Artificial Sequence
  Description of Artificial Sequence: Synthetic polypeptide
QVQLVQSGAEVKKPGSSVKVSCKASGGTFSSYAVSWVRQAPGQLEWVGRIIPIFGKANYAQKFQGRVTITADKSTSTAYMELSSLRPEDTAVYYCARDQGISANFKDAFDIWGQGTTVTVSS

SEQ ID NO: 515 - protein, 107 aa, Artificial Sequence
  Description of Artificial Sequence: Synthetic polypeptide
ETTLTQSPATLSVSPGERATLSCRASESVGSNLAWYQQKPGQAPSLLIYGASTRATGIPDRFSGSGSGTDFTLTISSLQSEDFAAYYCQQYNNWPLTFGPGTKVEIK

SEQ ID NO: 516 - protein, 125 aa, Artificial Sequence
  Description of Artificial Sequence: Synthetic polypeptide
QVQLVQSGAEVKKPGSSVKVSCKASGGTFSSYAISWVRQAPGQGLEWMGGIIPIFGTANYAQKFQGRVTITADKSTSTAYMELSSLRSEDTAVYYCARVGYCSSTSCHIGAFDIWGQGTTVTVSS

SEQ ID NO: 517 - protein, 107 aa, Artificial Sequence
  Description of Artificial Sequence: Synthetic polypeptide
ETTLTQSPGTLSLSPGERATLSCRASQSVSSSIAWYQQKPGQAPRLLMFDSSTRATGIPDRFSGSGSGTDFTLNISSLEPEDFAVYYCQQYSSSPYTFGQGTKLEIK

SEQ ID NO: 518 - protein, 125 aa, Artificial Sequence
  Description of Artificial Sequence: Synthetic polypeptide
QVQLVQSGAEVKKPGSSVKVSCKASGGTFSSYAISWVRQAPGQGLEWMGGIIPIFGTANYAQKFQGRVTITADKSTSTAYMELSSLRSEDTAVYYCARASYCSTTSCASGAFDIWGQGTLVTVSS

SEQ ID NO: 519 - protein, 113 aa, Artificial Sequence
  Description of Artificial Sequence: Synthetic polypeptide
DIQMTQSPDSLAVSLGERATINCKSSQSVLYSSNNKNYLAWYQQKPGQPPKLLIYWASARESGVPDRFSGSGSGTDFTLTISSLQPEDVAIYYCQQYYSVPFTFGPGTKVEIK

SEQ ID NO: 520 - protein, 121 aa, Artificial Sequence
  Description of Artificial Sequence: Synthetic polypeptide
EVQLVQSGAEVKKPGASVKVSCKASGYTFNVYAINWVRQAPGQGLEWMGRIIPILGIANYAQKFQGRVTITADKSTSTAYMELSSLRSEDTAVYYCARDYYGSGARGFDYWGQGTLVTVSS

SEQ ID NO: 521 - protein, 110 aa, Artificial Sequence
  Description of Artificial Sequence: Synthetic polypeptide
QPGLTQPPSVSKGLRQTATLTCTGNSNNVGNQGAAWLQQHQGHPPKLLSYTNNNRPSGISERLSASRSGNTASLAITGLQPEDEADYYCASWDSSLSVWVIGGGTKLTVL

SEQ ID NO: 522 - protein, 116 aa, Artificial Sequence
  Description of Artificial Sequence: Synthetic polypeptide
DVKLVESGGGLVKPGGSLKLSCAASGFTFSSYTMSWVRQTPEKRLEWVATISSGGSYTYYPDSVKGRFTISRDNAKNTLYLQMSSLKSEDTAMYYCTRDGNDYDYWGQGTTLTVSS

SEQ ID NO: 523 - protein, 107 aa, Artificial Sequence
  Description of Artificial Sequence: Synthetic polypeptide
DIQMTQTTSSLSASLGDRVTISCRASQDISNYLNWYQQKPDGTVKLLIYYTSRLHSGVPSRFSGSGSGTDYSLTISNLEQEDIATYFCQQGNTLPRTFGGGTKLEIK

SEQ ID NO: 524 - protein, 129 aa, Artificial Sequence
  Description of Artificial Sequence: Synthetic polypeptide
QVQLVQSGAEVKKPGSSVKVSCKASGGTFRSHAISWVRQAPGQGLEWMGGIIPFASANYAQKFQGRVTITADESTSTAYMDLSSLRSDDTAVYYCAKNVSPKSYSGRYSISYFYGVDVWGQGTTVTVSS

SEQ ID NO: 525 - protein, 111 aa, Artificial Sequence
  Description of Artificial Sequence: Synthetic polypeptide
QSALTQPPSASGTPGQRVTISCSGSSSNIGSNTVNWYQQLPGTAPKLLIYSNNQRPSGVPDRFSGSKSGTSASLAISGLQSEDEADYYCAAWDDSLSGHYVFGTGTKVTVL

SEQ ID NO: 526 - protein, 119 aa, Artificial Sequence
  Description of Artificial Sequence: Synthetic polypeptide
EVQLLESGGGLVQPGGSLRLSCADSGLTFSSYAMSWVRQAPGKGLEWVSAISVSGGSTYYSDSVKGRFTISRDNSKNTLSLQMNSLRAEDTAVYYCVKARSIVGPFDYWGQGTLVTVSS

SEQ ID NO: 527 - protein, 109 aa, Artificial Sequence
  Description of Artificial Sequence: Synthetic polypeptide
QSALTQPPSVSAAPGQKVTISCSGSSSNIGNNYVSWYQHLPGTAPKLLIYDNMRPSGIPDRFSGSKSGTSATLGITGLQTGDEADYYCGTWDTSLSAVVFGGGTKLTVL

SEQ ID NO: 528 - protein, 120 aa, Artificial Sequence
  Description of Artificial Sequence: Synthetic polypeptide
EVQLVESGAEVVKPGASVKMSCKASGYPFTSYNIHWIKQTPGQGLEWIGAIYPGNGDTSYTQKFKVKATLTSDKSSSTAYMQLSSLTSEDSAVYFCARYGNYPSYAMDYWGQGTSVTVSS

SEQ ID NO: 529 - protein, 111 aa, Artificial Sequence
  Description of Artificial Sequence: Synthetic polypeptide
DIVMTQSPASLTVSLGQRATISCRASKSVSASGYNYLHWYQQRPGQPPKLLIYLAFNLESGVPARFNGSGSGTDFTLNIHPVEEEDAATYYCQHSRDLPFTFGSGTKLEIK

SEQ ID NO: 530 - protein, 125 aa, Artificial Sequence
  Description of Artificial Sequence: Synthetic polypeptide
QVQLVQSGAEVKKPGSSVKVSCKASGGTFSSYTINWVRQAPGQGLEWMGGIIPIFGTANYAQKFQGRVTITADASTSTAYMELSSLRSEDTAVYYCARVLLRSSSWFSSNWFDPWGQGTLVTVSS

SEQ ID NO: 531 - protein, 110 aa, Artificial Sequence
  Description of Artificial Sequence: Synthetic polypeptide
QSVLTQPPSVSGAPGQRVTISCTGSSSNIGAGYDVHWYQQLPGTAPKVLIYGNSNRPSGVPDRFSGSKSDTSASLAITGLQAEDEADYYCQSYDSSLSVVFGGGTKLTVL

SEQ ID NO: 532 - protein, 131 aa, Artificial Sequence
  Description of Artificial Sequence: Synthetic polypeptide
QVQLVQSGAEVKRPGSSVKVSCKTSGGTFNNNAINWVRQAPGQGLEWMGGIIPFFGIAKYAQKFQGRVTITADESTSTAYMELSSLRSEDTAVYYCARDLPRESSYGSGSYYTHYYAMDVWGQGTTVTVSS

SEQ ID NO: 533 - protein, 108 aa, Artificial Sequence
  Description of Artificial Sequence: Synthetic polypeptide
EIVLTQSPATLSLSPGERATLSCGASQSVSSSYLAWYQQKPGLAPRLLIYDASSRATGIPDRFSGSGSGTDFTLTISRLEPEDFAVYYCQQYGSSPLTFGGGTKVEIK

SEQ ID NO: 534 - protein, 118 aa, Artificial Sequence
  Description of Artificial Sequence: Synthetic polypeptide
QVQLVQSGAEVKKPGASVKVSCKASGYTFTTYYMHWVRQAPGQGLEWMGIINPSGGSTSYAQKFQGRVTMTRDTSTSTVYMELSSLRSEDTAVYYCARGAVVVILDYWGQGTLVTVSS

SEQ ID NO: 535 - protein, 107 aa, Artificial Sequence
  Description of Artificial Sequence: Synthetic polypeptide
DIQMTQSPSTLSASVGDRVTITCRASQTISTWLAWYQQKPGKAPKLLIYKASSLESGVPSRFSGSGSGTEFTLTISSLQPDDFATYYCQQYNSYSYTFGQGTKLEIK

SEQ ID NO: 536 - protein, 125 aa, Artificial Sequence
  Description of Artificial Sequence: Synthetic polypeptide
EVQLLESGAEVKKPGSSVKVSCRASGGTFSSYAISWVRQAPGQGLEWMGRIIPILGIANYAQKFQGRVTITADKATSTAYMELSSLRSEDTAVYYCATRSGDYYGSGSYSAFDIWGQGTMVTVSS

SEQ ID NO: 537 - protein, 111 aa, Artificial Sequence
  Description of Artificial Sequence: Synthetic polypeptide
QSVLTQPPSVSGAPGQRVTPSCTGSSSNIGAGYDVHWYQQLPGTAPKLLIYGNSNRPSGVPDRFSGSKSGTSASLAITGLQAEDEADYYCQSYDSSLSGLMFGGGTKLTVL

SEQ ID NO: 538 - protein, 125 aa, Artificial Sequence
  Description of Artificial Sequence: Synthetic polypeptide
QVQLVQSGAEVEKAGASVKVSCKASGGTFSSYAISWVRQAPGQGLEWMGRIIPILGIANYAQKFQGRVTITADKSTSTAYMELSSLRSEDTAVYYCARRSGDYYGSGSYSAFDIWGQGTMVTVSS

SEQ ID NO: 539 - protein, 110 aa, Artificial Sequence
  Description of Artificial Sequence: Synthetic polypeptide
QSVLTQPPSVSAAPGQKVTISCSGSRSNIGNNYVSWYQQLPGTAPKLLIYDNNKRPSGIPDRSSGSKSGTSAALGITGLQTGDEADYYCGTWDNSLSAVVFGGGTKLTVL

SEQ ID NO: 540 - protein, 125 aa, Artificial Sequence
  Description of Artificial Sequence: Synthetic polypeptide
QVQLVQSGAEVKKPGSSVKVSCKASGGTFSSYAISWVRQAPGQGLEWMGRIIPILGIANYAQKFQGRVTITADKSTSTAYMELSSLRSEDTAVYYCARRSGDYYGSGSYSAFDIWGQGTMVTVSS

SEQ ID NO: 541 - protein, 111 aa, Artificial Sequence; identical to SEQ ID NO: 537
  Description of Artificial Sequence: Synthetic polypeptide

SEQ ID NO: 542 - protein, 125 aa, Artificial Sequence; identical to SEQ ID NO: 540
  Description of Artificial Sequence: Synthetic polypeptide

SEQ ID NO: 543 - protein, 112 aa, Artificial Sequence
  Description of Artificial Sequence: Synthetic polypeptide
QSVLTQPPSVSGAPGQRVTISCTGSSSNIGAGYDVHWYQQLPGTAPKLLIYGNSNRPSGVPDRFSGSKSGTSASLAITGLQAEDEADYYCGTWDSSLSAYVVFGGGTKLTVL

SEQ ID NO: 544 - protein, 126 aa, Artificial Sequence
  Description of Artificial Sequence: Synthetic polypeptide
QVQLVQSGAEVKKPGSSVKVSCKASGGTFSSYAISWVRQAPGQGLEWMGRIIPILGIANYAQKFQGRVTITADKSTSTAYMELSSLRSEDTAVYYCARATRSDYYGSGSYSAFDIWGQGTMVTVSS

SEQ ID NO: 545 - protein, 110 aa, Artificial Sequence
  Description of Artificial Sequence: Synthetic polypeptide
SYELTQPASVSGSPGQSITISCTGSSTDVGSSIYVSWYQQHPGKAPQLILYDVTNRPSGVSTRFSGSKSGNTASLTISGLRAEDEADYYCNSYTTSNTLVFGGGTKLTVL

SEQ ID NO: 546 - protein, 125 aa, Artificial Sequence
  Description of Artificial Sequence: Synthetic polypeptide
QMQLVQSGAEVKKPGASVKVSCKASGGTFSSYAISWVRQAPGQGLEWMGRIIPILGIANYAQKFQGRVTITADKSTSTAYMELSSLRSEDTAVYYCARRSGDYYGSGSYSAFDIWGQGTMVTVSS

SEQ ID NO: 547 - protein, 111 aa, Artificial Sequence
  Description of Artificial Sequence: Synthetic polypeptide
NFMLTQPPSVSGAPGQRVTISCTGSSSNIGAGYDVHWYQQLPGTAPKLLIYGNSNRPSGVPDRFSGSKSGTSASLAISGLRSEDEADYYCAAWDDSLSGYVFGTGTKVTVL

SEQ ID NO: 548 - protein, 125 aa, Artificial Sequence; identical to SEQ ID NO: 546
  Description of Artificial Sequence: Synthetic polypeptide

SEQ ID NO: 549 - protein, 112 aa, Artificial Sequence; identical to SEQ ID NO: 543
  Description of Artificial Sequence: Synthetic polypeptide

SEQ ID NO: 550 - protein, 126 aa, Artificial Sequence
  Description of Artificial Sequence: Synthetic polypeptide
QVQLVQSGAEVKKPGSSVKVSCKASGGTFSSYAISWVRQAPGQGLEWMGRIIPILGIANYAQKFQGRVTITADKSTSTAYMELSSLRSEDTAVYYCARDSYGDYTGSGYYYGMDVWGQGTTVTVSS

SEQ ID NO: 551 - protein, 112 aa, Artificial Sequence
  Description of Artificial Sequence: Synthetic polypeptide
DVVMTQSPLSLPVTPGEPASISCRSSQSLLHSNGYNYLDWYLQKPGQSPQLLIYLGSNRASGVPDRFSGSGSGTDFTLKISRVEAEDVGVYYCMQALQTPLTFGGGTKVEIK

SEQ ID NO: 552 - protein, 126 aa, Artificial Sequence
  Description of Artificial Sequence: Synthetic polypeptide
EVQLVQSGAEVKKPGSSVKVSCKASGGTFSSYAISWVRQAPGQGLEWMGRIIPILGIANYAQKFQGRVTITADKSTSTAYMELSSLRSEDTAVYYCARDSYGDYTGSGYYYGMDVWGQGTTVTVSS

SEQ ID NO: 553 - protein, 112 aa, Artificial Sequence; identical to SEQ ID NO: 447
  Description of Artificial Sequence: Synthetic polypeptide

SEQ ID NO: 554 - protein, 125 aa, Artificial Sequence
  Description of Artificial Sequence: Synthetic polypeptide
EVRLVQSGAEVEKAGASVKVSCKASGGTFSSYAISWVRQAPGQGLEWMGRIIPILGIANYAQKFQGRVTITADKSTSTAYMELSSLRSEDTAVYYCARRSGDYYGSGSYSAFDIWGQGTMVTVSS

SEQ ID NO: 555 - protein, 110 aa, Artificial Sequence
  Description of Artificial Sequence: Synthetic polypeptide
QSVLTQPPSVSAAPGQKVTISCSGSRSNIGNNYVSWYQRPPGTAPKLLIYDNNKRPSGIPDRFSGSKSGTSATLGITGLQTGDEADYYCGTWDNSLSAVVNGGGTKNTVV

SEQ ID NO: 556 - protein, 125 aa, Artificial Sequence
  Description of Artificial Sequence: Synthetic polypeptide
QVQLVQSGAEVKKPGASVKVSCKASGGTFSSYAISWVRQAPGQGLEWMGRIIPILGIANYAQKFQGRVTITADKSTSTAYMELSSLRSEDTAVYYCARRSGDYYGSGSYSAFDIWGQGTMVTVSS

SEQ ID NO: 557 - protein, 112 aa, Artificial Sequence; identical to SEQ ID NO: 543
  Description of Artificial Sequence: Synthetic polypeptide

SEQ ID NO: 558 - protein, 125 aa, Artificial Sequence; identical to SEQ ID NO: 540
  Description of Artificial Sequence: Synthetic polypeptide

SEQ ID NO: 559 - protein, 110 aa, Artificial Sequence
  Description of Artificial Sequence: Synthetic polypeptide
QYALTQPASVSGSPGQSITISCTGSSTDVGSSIYVSWYQQHPGKAPQLILYDVTNRPSGVSTRFSGSKSGNTASLTISGLRAEDEADYYCNSYTTSNTLVFGGGTKLTVL

SEQ ID NO: 560 - protein, 122 aa, Artificial Sequence
  Description of Artificial Sequence: Synthetic polypeptide
QVQLVQSGAEVKKPGSSVKVSCKASGGTFSTYALSWVRQAPGQGLEWMGGIIPIFGTANYAQKFQGRVTITADESTSTAYMELNSLRSEDTAVYYCARGSRSSSSAEYFQHWGQGTLVTVSS

SEQ ID NO: 561 - protein, 111 aa, Artificial Sequence
  Description of Artificial Sequence: Synthetic polypeptide
QSALTQPRSVSGSPGQSVTISCTGTSSDVGGYNYVSWYQQHPGKAPKLMIYDVSKRPSGVPDRFSGSKSGNTASLTISGLQAEDEADYYCCSYAGSYTLEWFGGGTKLTVL

SEQ ID NO: 562 - protein, 122 aa, Artificial Sequence
  Description of Artificial Sequence: Synthetic polypeptide
QVQLVESGGGLVKPGGSLRLSCAASGFTFSDYYMSWIRQAPGKGLEWVSYISSSGSTIYYADSVKGRFTISRDNAKNSLYLQMNSLRAEDTAVYYCARVGLGSGWYDWFDPWGQGTLVTVSS

SEQ ID NO: 563 - protein, 110 aa, Artificial Sequence
  Description of Artificial Sequence: Synthetic polypeptide
QSALTQPPSVSGAPGQRVTISCTGSSSNIGASYDVHWYQHLPGTAPKLLIYGNTNRPSGVPDRFSGSKSGTSASLAITGLQAEDEADYYCQSYDSSLSGWFSGGTKLTVL

SEQ ID NO: 564 - protein, 127 aa, Artificial Sequence
  Description of Artificial Sequence: Synthetic polypeptide
QVQLVQSGAEVKKPGSSVKVSCKASGGTFSIYAISWVRQAPGQGLEWMGGIIPIFGTANYAQKFQGRVTITADKSTSTAYMELSSLRSEDTAVYYCAREGGHQGYCSGGSCYDFDYWGQGTLVTVSS

SEQ ID NO: 565 - protein, 111 aa, Artificial Sequence
  Description of Artificial Sequence: Synthetic polypeptide
DVVMTQSPLSLPVTPGEPASISCRSSQSLLHSNGYNYLDWYLQKPGQSPQLLIYLGSNRASGVPDRFSGSGSGTDFTLKISRVEAEDVGVYYCMQALQTPAFGGGTKLEIK

SEQ ID NO: 566 - protein, 126 aa, Artificial Sequence
  Description of Artificial Sequence: Synthetic polypeptide
QLQLQESGPGLVKPSETLSLTCTVSGGSISSSSYYWGWIRQPPGKGLEWIGSIYYSGSTYYNPSLKSRVTISVDTSKNQFSLKLSSVTAADTAVYYCASLLRPLIYCSGGSCTDYWGQGTLVTVSS

SEQ ID NO: 567 - protein, 110 aa, Artificial Sequence
  Description of Artificial Sequence: Synthetic polypeptide
QSALTQPASVSGSPGQSITISCTGTSSDVGGYNYVSWCQQHPGKAPKLMIYEVSNRPSGVSNRFSGSKSGNTASLTISGLQAEDEADYYCSSYTSNITLVFGTGTKVTVL

SEQ ID NO: 568 - protein, 116 aa, Artificial Sequence
  Description of Artificial Sequence: Synthetic polypeptide
EVKLVESGGGLVKPGGSLKLSCAASGFTFSSYAMSWVRQTPEKRLEWVATISSGGTYTYYPDSVKGRFTISRDNAENTLYLQMSSLRSEDTAMYYCVRDGNSMDYWGQGTSVTVSS

SEQ ID NO: 569 - protein, 107 aa, Artificial Sequence
  Description of Artificial Sequence: Synthetic polypeptide
DIQMTQTTSSLSASLGDRVTIICRASQDINNYLNWYQQKPDGTVKLLIYYTSRLHSGVPSRFSGSGSGSDYSLTISNLEQEDIATYFCQQANTLPPTFGAGTKLELR

SEQ ID NO: 570 - protein, 121 aa, Artificial Sequence
  Description of Artificial Sequence: Synthetic polypeptide
EVKLEESGGGLVKPGGSLKLSCAASGFTFSRYAMSWWQTPEKRLEWVATINNGGSYSYYPDSVKGRLTISRDNAKNTLYLQMSSLRSEDTALYYCARHYDYDGYYYTMDFWGQGTSVTVSS

SEQ ID NO: 571 - protein, 112 aa, Artificial Sequence
  Description of Artificial Sequence: Synthetic polypeptide
DVIMTQIPLSLPVSLGDQASISCRSSQSIVHSNGNTYLEWYLQKPGQSPKPLIYKVSNRISGVPDRFSGSGSGTDFTLKISRVEAEDLGVYYCFQGSHVPYTFGGGTNLEIK

SEQ ID NO: 572 - protein, 117 aa, Artificial Sequence
  Description of Artificial Sequence: Synthetic polypeptide
QVQLQESGPGLVKPSETLSLTCAVSGGSISSNYWYWIRQSPVKGLEWIGYIYGGSGGTEYNPSLKSRVTISTDTSKNQFFLKLSSVTAADTAVYYCARSFYSWNGESWGQGVWTVSS

SEQ ID NO: 573 - protein, 107 aa, Artificial Sequence
  Description of Artificial Sequence: Synthetic polypeptide
DIQMSQTPSSLSASVGDRVTITCRASQGINDYLNWYQQKPGKAPKLLIYYGNSLASGVPSRFSGSGSGTDFSLTISSLQPEDFATYYCQQGDSFPLTFGGGTKVDIK

SEQ ID NO: 574 - protein, 121 aa, Artificial Sequence
  Description of Artificial Sequence: Synthetic polypeptide
EVQLVQSGAEVKKPGASVKVSCKASGHIFTSYVINWLQAEPGQGFEWMGGIHPGNGGRDYAQKFQGRVTITADMSTSTVYMELRSLRSEDMAVYYCAASSGSYGVSSLDVWGRGVLVTVSS

SEQ ID NO: 575 - protein, 116 aa, Artificial Sequence
  Description of Artificial Sequence: Synthetic polypeptide
QSALTQPPSLSASPGASARLPCTLSSDLSVGSKNMYWYQQKPGSAPRLFLYYYSDSDKQLGPGVPNRVSGSKETSSNTAFLLISGLQPEDEADYYCQVYDSSANWVFGGGTRLTVL

SEQ ID NO: 576 - protein, 118 aa, Artificial Sequence
  Description of Artificial Sequence: Synthetic polypeptide
QVQLQQSGGELVKPGASVKLSCKTSGFTFSSSYISWLKQKPGQSLEWIAWIYAGTGGTEYNQKFTGKAQVTVDTSSSTAYMQFSSLTTEDSAIYYCARGGSSFAMDYWGQGTSVTVSS

SEQ ID NO: 577 - protein, 111 aa, Artificial Sequence
  Description of Artificial Sequence: Synthetic polypeptide
QLVLTQSPASLAVSLGQRATISCRASESVDNYGISFMNWFQQKPGQPPKLLIHTASNQGSGVPARFSGSGSGTDFSLNIHPVEDDDTAMYFCQQSEEVPLTFGAGTKLEIK

SEQ ID NO: 578 - protein, 122 aa, Artificial Sequence
  Description of Artificial Sequence: Synthetic polypeptide
QVQLQQSGPELVRPGVSVKISCKGSGYTFTDYAIHWVKQSHAKSLEWIGVFSTYYGNTNYNQKFKGRATMTVDKSSSTAYMELARLTSEDSAIYYCARKSYYVDYVDAMDYWGQGTSVTVSS

SEQ ID NO: 579 - protein, 111 aa, Artificial Sequence
  Description of Artificial Sequence: Synthetic polypeptide
DIVLTQSPASLAVSLGQRATISCRASESVDNYGISFMNWFQQKPGQPPKLLISATSNQGSGVPARFIGSGSGTDFSLNIHPVEEDDTAMYFCQQSKEVPRTFGGGTKLEIK

SEQ ID NO: 580 - protein, 118 aa, Artificial Sequence
  Description of Artificial Sequence: Synthetic polypeptide
EVQLVESGGGLVQPGGSLRLSCSASGFYFSSYDMSWVRQAPGKGLEWVSAIRGSGHTTYYADSVKGRFTISRDNSKNTLYLEMNSLRAEDTAVYYCVKDGSIVGFDPWGQGTLVTVSS

SEQ ID NO: 581 - protein, 107 aa, Artificial Sequence
  Description of Artificial Sequence: Synthetic polypeptide
DIQMTQSPSTLSASVGDRVTITCRASQTISSWLAWYQQKPGKAPKLLIYKASSLESGVPSRFSGSGSGTEFTLTISSLQPDDFATYYCQQYNSYSYTFGQGTKLEIK

SEQ ID NO: 582 - protein, 125 aa, Artificial Sequence
  Description of Artificial Sequence: Synthetic polypeptide
QVQLVQSGAEVKKPGSSVKVSCKASGGSFSVYAISWVRQAPGQGLEWMGGIIPIFGTANYAQKFQDRFTITTDESTSTAYMELSSLRSEDTAMYYCAREGDIVVLPAGKGGMDVWGQGTTVTVSS

SEQ ID NO: 583 - protein, 112 aa, Artificial Sequence
  Description of Artificial Sequence: Synthetic polypeptide
DIVMTQSPLSLPVTPGEPASISCRSSQSLLHGNGYNYLDWYLQKPGQSPQLLIYLVSHRASGVPDRFSGSGSGTDFTLKISRVEAEDVGVYYCMQALQSPWTFGQGTKVEIK

SEQ ID NO: 584 - protein, 118 aa, Artificial Sequence
  Description of Artificial Sequence: Synthetic polypeptide
EVQLVESGGGLVQPGGSLRLSCVVSGFTFSNYDMSWVRQAPGRGLEWVSAIRGSGFNTYYADSVKGRFTISRDNSKNTLYLQMNSLRAEDTAVYYCAKDGSIVSMDYWGQGTLVTVSS

SEQ ID NO: 585 - protein, 107 aa, Artificial Sequence
  Description of Artificial Sequence: Synthetic polypeptide
DIQMTQSPSALSASVGDRVTITCRASQSISSWLAWYQQKPGKAPKLLIYKASSLESGVPSRFSGSGSGTEFTLTISSLQPDDFATYYCQQYNSYSWTFGQGTKVEIK

SEQ ID NO: 586 - protein, 118 aa, Artificial Sequence
  Description of Artificial Sequence: Synthetic polypeptide
QVQLQESGPGLVKPSETLSLTCTVSGGSISSYYWSWIRQPPGKGLEWIGYIYYSGSPNYNPSLKSRVTISVDTSKNQFSLKLTSVTAADTAVYYCARSLNWGPPFDYWGQGTLVTVSS

SEQ ID NO: 587 - protein, 107 aa, Artificial Sequence
  Description of Artificial Sequence: Synthetic polypeptide
EIVMTQSPATLSLSPGERATLSCRASQSVSSNLAWYQQKPGQAPRLLIYGASTRATGIPARFSGSGSGTEFTLTISSLQSEDFAVYYCQQFNNWPYTFGQGTKLEIK

SEQ ID NO: 588 - protein, 118 aa, Artificial Sequence
  Description of Artificial Sequence: Synthetic polypeptide
EVQLLESGGGLVQPGGSLRLSCAASGFTFSSYAMSWVRQAPGKGLEWVSAISGRGGNTYYADSVKGRFTISRDNSKNTLFLQMNTLRAEDTAVYYCAKDRGFGFFDIWGRGTLATVSS

SEQ ID NO: 589 - protein, 107 aa, Artificial Sequence
  Description of Artificial Sequence: Synthetic polypeptide
DIQMTQSPSSLSASVGDRVTITCQASQDISNYLNWYQQKPGKAPKFLIYDASNLETGVPSRFSGSGSGTDFTFTISSLQPEDIATYYCQQYDNLPFTFGPGTKINIK

SEQ ID NO: 590 - protein, 131 aa, Artificial Sequence
  Description of Artificial Sequence: Synthetic polypeptide
EVQLLESGPGVVRPSETLSLSCAVSGGSISDSYRWSWIRQPPGKGLEWVGYIFATGTTTNYNPSLKSRVTISKDTSKNQFSLKLSSVTAADTAVYYCAREPFKYCSGGVCYAHKDNSLDVWGQGVLVTVSS

SEQ ID NO: 591 - protein, 106 aa, Artificial Sequence
  Description of Artificial Sequence: Synthetic polypeptide
EIVMTQSPATLSLSPGERATLSCRASQSVSSNLAWYQQKPGQAPRLLIHSASSRATGIPDRFSGSGSGTEFSLTISSLEAEDVGVYHCYQHSSGYTFGPGTKLDIK

SEQ ID NO: 592 - protein, 121 aa, Artificial Sequence
  Description of Artificial Sequence: Synthetic polypeptide
QVQLQESGPGLVKPSETLSLTCAVSGGSISSNYWNWIRQSPGKGLEWIGYIYGGSGSTTYNPSLKSRVAISTDTSKDQFSLKLSSVTAADTAVYYCARLLPLGGGYCFDYWGQGVLVTVSS

SEQ ID NO: 593 - protein, 113 aa, Artificial Sequence
  Description of Artificial Sequence: Synthetic polypeptide
DIVMTQTPFTLPVTPGEAASISCRSSQSLFDSDYGNTYLDWYLQKPGQSPQLLIYMLSNRASGVPDRFSGSGSGTDFTLKISRVEAEDVGLYYCMQSVEYPFTFGPGTKLDIK

SEQ ID NO: 594 - protein, 117 aa, Artificial Sequence
  Description of Artificial Sequence: Synthetic polypeptide
QVQLQESGPGLVKPSETLSLTCAVSGDSISSNYWSWIRQPPGKGLEWIGRFSGSGGSTDFNPSLKSRVTISTDTSKNQFSLNLRSVTAADTAVYYCAKTYSGTFDYWGQGVLVTVSS

SEQ ID NO: 595 - protein, 107 aa, Artificial Sequence
  Description of Artificial Sequence: Synthetic polypeptide
DIQMTQSPSSLSASVGDRVTITCRASQDINNYLSWYQQKPGKAPKPLIYYASSLETGVPSRFSGSRSGTDYTLTISSLQLEDFATYYCQQYNNSPYSFGQGTKVEIK

SEQ ID NO: 596 - protein, 119 aa, Artificial Sequence
  Description of Artificial Sequence: Synthetic polypeptide
EVQLVESGGGLVKPGGSLRLSCAASGFAFSSYSMIWVRQAPGKGLEWVSSISTSSGYIYYADSVKGRFTISRDNAKNSLYLQMNSLRAEDTAVYYCARAPIDAVAFDIWGQGTMVTVSS

SEQ ID NO: 597 - protein, 110 aa, Artificial Sequence
  Description of Artificial Sequence: Synthetic polypeptide
ELVLTQPPSASGTPGQRVNISCSGSRSNVGSNAVTWYQQVPGTAPKLLIYNNSKRPSGVPDRFSGSKSGTSASLAISGLQSEEEADYYCAAWDDSLNGPVFGGGTKVTVL

SEQ ID NO: 598 - protein, 127 aa, Artificial Sequence
  Description of Artificial Sequence: Synthetic polypeptide
EVQLLESGGGLVKPGGSLRLSCEASGLTFSNVWMSWVRQAPGKGLEWVGRIKRKSEGATTDYGAPVKGRFTLSRDDSKNTVYLQMNSLKIDDTAVYYCSTLTRGGDVWSSSYYFDYWGQGALVTVSS

SEQ ID NO: 599 - protein, 109 aa, Artificial Sequence
  Description of Artificial Sequence: Synthetic polypeptide
QSALTQPASVSGSPGQSITISCTGTSSDVGTYDLVSWYQQHPGKSPKLMIYADIKRPSGVSHRFSGSKSGNTASLTISGLQSADEADYYCCLYAGSSTSVIFGGGTKVT

SEQ ID NO: 600 - protein, 118 aa, Artificial Sequence
  Description of Artificial Sequence: Synthetic polypeptide
QVQLKGSGPGLVAPSQSLSITCTVSGFSLTGYGVNWVRQPPGKGLEWLGMIWGDGSTDYNSALKSRLSISKDNSKSQVFLKMNSLQTDDTARYYCARVGDYGDYFDYWGQGTTLTVSS

SEQ ID NO: 601 - protein, 106 aa, Artificial Sequence
  Description of Artificial Sequence: Synthetic polypeptide
DIQMTQSPASLSASVGETVTITCRASENIYSYLAWYQQKQGKSPQLLVYNAKTLAEGVPSRFSGSGSGTQFSLKINSLQPEDFGSYYCQHHYGTPWFGGGTKLEIK

SEQ ID NO: 602 - protein, 126 aa, Artificial Sequence
  Description of Artificial Sequence: Synthetic polypeptide
EVQLVQSGAEVKKPGSSVKVSCKASGGTFSSYAISWVRQAPGQGLEWMGGIIPIFGIANYAQKFQGRVTITADKSTSTAYMELSSLRSEDTAVYYCASSNYYGSGSYYPRSAFDIWGQGTTVTVSS

SEQ ID NO: 603 - protein, 107 aa, Artificial Sequence
  Description of Artificial Sequence: Synthetic polypeptide
ETTLTQSPATLSVSPGERAILSCRASQSISNDLAWYQQKPGQAPRLLIYGASSRATGIPDRFSGSGSGTDFTFTISRLESEDFAVYYCQQYGVSPLTFGGGTKVEIK

SEQ ID NO: 604 - protein, 125 aa, Artificial Sequence
  Description of Artificial Sequence: Synthetic polypeptide
QVQLVQSGAEVKKPGSSVKVSCKASGGTFSSYAISWVRQAPGQGLEWMGGIIPIFGTASYAQKFQGRVTITADKSTSTAYMELSSLRSEDTAVYYCARVGYCSSTSCNRGAFDIWGQGTMVTVSS

SEQ ID NO: 605 - protein, 107 aa, Artificial Sequence
  Description of Artificial Sequence: Synthetic polypeptide
DIQLTQSPSSLSASVGDRVTITCRASQGIRNDLGWYQQKPGKAPKLLIYAASSLQSGVPSRFSGSGSGTDFTLTISSLQPEDFATYYCQQLNSYPLTFGGGTKVEIK

SEQ ID NO: 606 - protein, 129 aa, Artificial Sequence
  Description of Artificial Sequence: Synthetic polypeptide
QVQLQQSGAEVKKPGSSVKVSCKASGGTFSSYTISWVRQAPGQGLEWMGRIIPIFGTANYAQKFQGRVTITADKSTSTAYMELSSLRSEDTAVYYCARDLGPGGDSSGYYYGPGAFDIWGQGTMVTVSS

SEQ ID NO: 607 - protein, 112 aa, Artificial Sequence
  Description of Artificial Sequence: Synthetic polypeptide
EIVLTQSPLSLPVTPGEPASISCRSSQSLLHSNGYNYLDWYLQKPGKSPQLLIYLGSNRASGVPDRFSGSGSGTDFTLKISRVEAEDVGVYYCMQALQTPLTFGGGTKVEIK

SEQ ID NO: 608 - protein, 126 aa, Artificial Sequence
  Description of Artificial Sequence: Synthetic polypeptide
QVQLQQSGAEVKKRGSSVKVSCKASGGTFSSYTISWVRQAPGQGLEWMGRIIPILGIANYAQKFQGRVTITADKSTSTAYMELSSLRSEDTAVYYCARDLYDSSGYYRNTDAFDIWGQGTMVTVSS

SEQ ID NO: 609 - protein, 107 aa, Artificial Sequence
  Description of Artificial Sequence: Synthetic polypeptide
EIVMTQSPVTLSLSPGERATLSCRASQSVSSYLAWYQQKPGQAPRLLIYDASNRATGIPARFSGSGSGTDFTLTISSLEPEDFAVYYCQQYGSSPWTFGQGTKVEIK

SEQ ID NO: 610 - protein, 124 aa, Artificial Sequence
  Description of Artificial Sequence: Synthetic polypeptide
ATRLEESGAEVKKPGSSVKVSCKASGGTFSSYAISWVRQAPGQGLEWMGRIIPILGIANYAQKFQGRVTITADKSTSTAYMELSSLRSEDTAVYYCASKQGDYYDRTSYAFDIWGQGTMVTVSS

SEQ ID NO: 611 - protein, 108 aa, Artificial Sequence
  Description of Artificial Sequence: Synthetic polypeptide
DVELTQSPGTLSLSPGERATLSCRASQSVSSSYLAWYQQKPGQAPRLLIYGASSRATGIPDRFSGSGSGTDFTLTISRLEPEDFAVYYCQQYGSSPITFGQGTRLEIK

SEQ ID NO: 612 - protein, 120 aa, Artificial Sequence
  Description of Artificial Sequence: Synthetic polypeptide
VQLLETGGGLVKPGGSLRLSCAASGFSLSDYYMNWIRQAPGKGLEWVAYISSSSGYTNYGDSVKGRFTISRDHAKNSLYLQMNSLRVEDTAVYYCVRDRDDFWSGYYKHWGLGTLVTVSS

SEQ ID NO: 613 - protein, 106 aa, Artificial Sequence
  Description of Artificial Sequence: Synthetic polypeptide
DIRLTQSPSFLSASVGDRVTITCRASQDINSFLAWYQQRPGKAPKLLIYGASNLETGVPSRFSGGGSGTDFTLTISSLQPEDIATYYCQQYDKLPTFGQGTRLEIK

SEQ ID NO: 614 - protein, 111 aa, Artificial Sequence
  Description of Artificial Sequence: Synthetic polypeptide
VQLVESGGGLVQPGRSLRLSCAASGFTFSNYAMYWVRQAPGKGLEWVALISYDISTDYYADSVKGRFTISRDNSKNTIYLQMNNLRTEDTALYYCAGNDYWGQGTLVTVSS

SEQ ID NO: 615 - protein, 110 aa, Artificial Sequence
  Description of Artificial Sequence: Synthetic polypeptide
QPVLTQSPSASGTPGQRVTISCSGSSSNIGNNYVYWYQQLPGTAPKLLIYWNDQRPSGVPDRFSGSKSGTSASLAISGLRSEDEADYYCAAWDDSLSGAVFGGGTQLTVL

SEQ ID NO: 616 - protein, 111 aa, Artificial Sequence
  Description of Artificial Sequence: Synthetic polypeptide
EVQLVESGGGLVQPGRSLRLSCAASGFTFSNYAMYWVRQAPGKGLEWVALISYDISTDYYADSVKGRFTISRDNSKNTIYLQMNNLRTEDTALYYCTNTYYWGQGTLVTVS

SEQ ID NO: 617 - protein, 112 aa, Artificial Sequence
  Description of Artificial Sequence: Synthetic polypeptide
GSQPVLTQSPSASGTPGQRVTISCSGSSSNIGNNYVYWYQQLPGTAPKLLIYWNDQRPSGVPDRFSGSKSGTSASLAISGLRSEDEADYYCAAWDDSLSGAVFGGGTQLTVL

SEQ ID NO: 618 - protein, 118 aa, Artificial Sequence; identical to SEQ ID NO: 588
  Description of Artificial Sequence: Synthetic polypeptide

SEQ ID NO: 619 - protein, 107 aa, Artificial Sequence; identical to SEQ ID NO: 589
  Description of Artificial Sequence: Synthetic polypeptide

SEQ ID NO: 620 - protein, 118 aa, Artificial Sequence; identical to SEQ ID NO: 584
  Description of Artificial Sequence: Synthetic polypeptide

SEQ ID NO: 621 - protein, 107 aa, Artificial Sequence; identical to SEQ ID NO: 585
  Description of Artificial Sequence: Synthetic polypeptide

SEQ ID NO: 622 - protein, 119 aa, Artificial Sequence
  Description of Artificial Sequence: Synthetic polypeptide
EVQLVESGGGLVQPGGSLRLSCAASGFTFSSYAMHWVRQAPGKGLEWVSSIYSSGGYIYYADSVKGRFTISRDNSKNTLYLQMNSLRAEDTAVYYCAKDQYVSTDFDIWGQGTLVTVSS

SEQ ID NO: 623 - protein, 107 aa, Artificial Sequence
  Description of Artificial Sequence: Synthetic polypeptide
DIQMTQSPSSLSASVGDRVTITCRASQSISNYLNWYQQKPGKAPKLLIYDASRLQSGVPSRFSGSGSGTDFTLTISSLQPEDFATYYCQQSYSYPWTFGQGTKVEIK

SEQ ID NO: 624 - protein, 119 aa, Artificial Sequence
  Description of Artificial Sequence: Synthetic polypeptide
EVQLVESGGGLVQPGGSLRLSCAASGFTFSSYGMSWVRQAPGKGLEWVSAISQSGGYIYYADSVKGRFTISRDNSKNTLYLQMNSLRAEDTAVYYCAKHLYGSWAFDIWGQGTLVTVSS

SEQ ID NO: 625 - protein, 107 aa, Artificial Sequence
  Description of Artificial Sequence: Synthetic polypeptide
DIQMTQSPSSLSASVGDRVTITCRASQSIGSYLNWYQQKPGKAPKLLIYAASNLQSGVPSRFSGSGSGTDFTLTISSLQPEDFATYYCQQSYSFPFTFGQGTKVEIK

SEQ ID NO: 626 - protein, 119 aa, Artificial Sequence
  Description of Artificial Sequence: Synthetic polypeptide
EVQLVESGGGLVQPGGSLRLSCAASGFTFSDYAMSWVRQAPGKGLEWVSAISQSGSYTNYADSVKGRFTISRDNSKNTLYLQMNSLRAEDTAVYYCAKVSSQTLRFDYWGQGTLVTVSS

SEQ ID NO: 627 - protein, 107 aa, Artificial Sequence
  Description of Artificial Sequence: Synthetic polypeptide
DIQMTQSPSSLSASVGDRVTITCRASQSISSYLNWYQQKPGKAPKLLIYGASSLQSGVPSRFSGSGSGTDFTLTISSLQPEDFATYYCQQSYSFPFTFGQGTKVEIK

SEQ ID NO: 628 - protein, 121 aa, Artificial Sequence
  Description of Artificial Sequence: Synthetic polypeptide
QVQLQESGPGLVKPSETLSLTCSVSGGSISSHYWSWIRQPPGKGLEWIGYIYYSGSTNHNPSLKSRVTISVDTSKNQFSLKLSSVTAADTAVYYCARGVLLWFGEPIFEIWGQGTMVTVSS

SEQ ID NO: 629 - protein, 106 aa, Artificial Sequence
  Description of Artificial Sequence: Synthetic polypeptide
EIVMTQSPATLSVSPGERATLSCRASQSVSSSLAWYQQKPGQAPRLLIYGASTRAPGIPARFSGSGSGTEFTLTISSLQSEDFAVYYCQQYNNWPLTFGGGTKVEI

SEQ ID NO: 630 - protein, 119 aa, Artificial Sequence
  Description of Artificial Sequence: Synthetic polypeptide
EVQLQQSGPVLVKPGASVRMSCKASGYTITDYYLNWVKQSHGKSLEWLGVLNPYSGGSLYSQTFKGKATLTVDRSSSTAYLELNSLTSEDSAVYYCARQLGRGNGLDYWGQGTSVTVSS

SEQ ID NO: 631 - protein, 112 aa, Artificial Sequence
  Description of Artificial Sequence: Synthetic polypeptide
NIMMTQSPSSLAVSAGEKVTMSCKSSQSVLHSSDQKNYLAWYQQKPGQSPKLLIYWASTRESGVPDRFTGSGSGTDFTLTISSVQAEDLAVYFCHQYLSSYTFGGGTKLEIK

SEQ ID NO: 632 - protein, 125 aa, Artificial Sequence
  Description of Artificial Sequence: Synthetic polypeptide
EVQLVQSGAEVKKPGESLKISCKGSGYSFTSYWIGWVRQMPGKGLEWMGVIYPGDSDTRYSPSFQGQVTISADKSISTAYLQWSSLKASDTAMYYCARTQWGYNYGSHFFYMDVWGKGTTVTVSS

SEQ ID NO: 633 - protein, 110 aa, Artificial Sequence
  Description of Artificial Sequence: Synthetic polypeptide
QSVLTQPPSASGTPGQRVTISCSGSSSNIGSDHVYWYQQLPGTAPKLFIYRNNQRPSGVPDRFSGSKSGTSASLAISGLRSEDEADYYCAAWDASLSGYVFGTGTKVTVL

SEQ ID NO: 634 - protein, 118 aa, Artificial Sequence
  Description of Artificial Sequence: Synthetic polypeptide
QVQLVQSGAEVKKPGSSVKVSCKASGGTFSSSAISWVRQAPGQGLEWMGGIIPILDITNYAQKFQGRVTITADKSTSTAFMELSSLRSEDTAVYYCALRNQWDLLVYWGQGTLVTVSS

SEQ ID NO: 635 - protein, 108 aa, Artificial Sequence
  Description of Artificial Sequence: Synthetic polypeptide
EIVLTQSPGTLSLSPGERATLSCRASQSVSSSYLAWYQQKPGQAPRLLIYGASSRATGIPDRFSGSGSGTDFTLTISRLEPEDFAVYYCQHYGSSLWTFGQGTKLEIK

SEQ ID NO: 636 - protein, 123 aa, Artificial Sequence
  Description of Artificial Sequence: Synthetic polypeptide
VQLQQESGPGLVKPSETLSLTCTVSGGSISSSSYYWGWIRQPPGKGLEWIGSIYYSGSTYYNPSLKSRVTISVDTSKNQFSLKLSSVTAADTAVYYCARRSTSRWGYYYMDVWGKGTRVTVSS

SEQ ID NO: 637 - protein, 108 aa, Artificial Sequence
  Description of Artificial Sequence: Synthetic polypeptide
DIVMTQSPSSLSASVGDRVTITCRASQSISNYLNWYQQKPGKAPKLLLYAASDLQSGVPSRFSGSGSGTDFTLTISSLQPEDFATYYCQQSYSTHMSTFGQGTKVDIK

SEQ ID NO: 638 - protein, 121 aa, Artificial Sequence
  Description of Artificial Sequence: Synthetic polypeptide
QVQLQESGPGLVKPSETLSLTCTVSGGSISSYYWSWIRQPPGKGLEWIGYVYYSGSTNYNPSLKSRVTISVDTSKNEFSLKLSSVTAADTAVYYCASSQRPDGNLYYFDYWGQGTLVTVSS

SEQ ID NO: 639 - protein, 108 aa, Artificial Sequence
  Description of Artificial Sequence: Synthetic polypeptide
SYVLTQPPSVSVAPGQTARITCGGNNIGSKTVHWYQQKPGQAPVLVVYDDSDRPSGIPERFSGSNSGNTATLTISRVEAGDEADYYCQVWDSSSDHYVFGTGTKVTVL

SEQ ID NO: 640 - protein, 120 aa, Artificial Sequence
  Description of Artificial Sequence: Synthetic polypeptide
EVQLVQSGAEVKKPGATVKISCKVSGYSFSNYYIHWVKQAPGKSLEWIGYIDPFNGGTSDNLKFKGAATLTADTSTDTAYMELSSLRSEDTAVYYCARSEYDPYYVMDYWGQGTTVTVSS

SEQ ID NO: 641 - protein, 105 aa, Artificial Sequence
  Description of Artificial Sequence: Synthetic polypeptide
IVLTQSPFQSVSPKEKVTITCRASQSISSNLHWYQQKPDQSPKLLIKYASQSISGIPSRFSGSGSGTDFTLTINSLEAEDFGIYFCQQTNFWPYIFGQGTKLEIL

SEQ ID NO: 642 - protein, 118 aa, Artificial Sequence
  Description of Artificial Sequence: Synthetic polypeptide
QVQLQQSGAEVKKPGSSVKVSCKASGGTFSTYSISWVRQAPGQGLEWMGGIAPSHGFANYAQKFQGRVTITTDESTSTAYMELSSLRSEDTAVYYCARDTATGGMDVWGQGTTVTVSS

SEQ ID NO: 643 - protein, 107 aa, Artificial Sequence
  Description of Artificial Sequence: Synthetic polypeptide
SYELTQPPSVSVAPGKTARITCGGNNIGSKSVHWYQQKPGQAPVLVVYDDSDRPSGIPERFSGSNSGNTATLTISRVEAGDEADYYCQVWDTYSDYVFGTGTKVTVL

SEQ ID NO: 644 - protein, 119 aa, Artificial Sequence
  Description of Artificial Sequence: Synthetic polypeptide
VQLVESGGGLVQPGGSLRLSCAASGFTFSSYDMHWVRQTTGKGLEWVSTIGTAGDTYYPDSVKGRFTISREDAKNSLYLQMNSLRAGDTAVYYCARGDSSGYYYYFDYWGQGTLLTVSS

SEQ ID NO: 645 - protein, 108 aa, Artificial Sequence
  Description of Artificial Sequence: Synthetic polypeptide
DIEMTQSPSSLSAAVGDRVTITCRASQSIGSYLNWYQQKPGKAPKLLIYAASSLQSGVPSRFSGSGSGTDFTLTISSLQPEDFAIYYCQQSYVSPTYTFGPGTKVDIK

SEQ ID NO: 646 - protein, 123 aa, Artificial Sequence
  Description of Artificial Sequence: Synthetic polypeptide
QVQLVQSGPEVKKPGTSVRVSCKASGFTFTSSAVQWVRQARGQRLEWVGWIVVGSGNTNYAQKFHERVTITRDMSTSTAYMELSSLRSEDTAVYYCASPYCSGGSCSDGFDIWGQGTMVTVSS

SEQ ID NO: 647 - protein, 109 aa, Artificial Sequence
  Description of Artificial Sequence: Synthetic polypeptide
DIVLTQTPGTLSLSPGERATLSCRASQSVSSSYLAWYQQKPGQAPRLLIYGASSRATGIPDRFSGSGSGTDFTLTISRLEPEDFAVYYCQQYVGLTGWTFGQGTKVEIK

SEQ ID NO: 648 - protein, 126 aa, Artificial Sequence; identical to SEQ ID NO: 376
  Description of Artificial Sequence: Synthetic polypeptide

SEQ ID NO: 649 - protein, 107 aa, Artificial Sequence; identical to SEQ ID NO: 377
  Description of Artificial Sequence: Synthetic polypeptide

SEQ ID NO: 650 - protein, 117 aa, Artificial Sequence; identical to SEQ ID NO: 378
  Description of Artificial Sequence: Synthetic polypeptide

SEQ ID NO: 651 - protein, 106 aa, Artificial Sequence; identical to SEQ ID NO: 379
  Description of Artificial Sequence: Synthetic polypeptide

SEQ ID NO: 652 - protein, 121 aa, Artificial Sequence; identical to SEQ ID NO: 380
  Description of Artificial Sequence: Synthetic polypeptide

SEQ ID NO: 653 - protein, 100 aa, Artificial Sequence; identical to SEQ ID NO: 381
  Description of Artificial Sequence: Synthetic polypeptide

SEQ ID NO: 654 - protein, 124 aa, Artificial Sequence
  Description of Artificial Sequence: Synthetic polypeptide
EVQLVESGGGLVKPGGSLRLSCAASGFTFSSYYMNWVRQAPGKGLEWVSSISSDGYNTYYPDSLKGRFTISRDSAKNSLYLQMNSLRADDTAVYYCARDFSGHTAVAGTGFEYWGQGTLVTVSS

SEQ ID NO: 655 - protein, 112 aa, Artificial Sequence
  Description of Artificial Sequence: Synthetic polypeptide
QPVLTQPPSVSGAPGQRITISCTGSSSNIGAGYDVHWYQQLPGTAPKLLIYGSSSRPSGVPDRFSGSKSGTSASLAITGLQAEDEADYYCQSYDSSLSVLYVFGTGTKVTVL

What is claimed is:

1. A multimeric binding molecule comprising two to six bivalent binding units or variants or fragments thereof, wherein each binding unit comprises two IgM or IgA heavy chain constant regions or multimerizing fragments or variants thereof, each associated with a binding domain, wherein three to twelve of the binding domains are identical and specifically bind to a human coronavirus, and wherein the binding molecule is more potent than a bivalent reference IgG antibody comprising two of the binding domains that specifically bind to the human coronavirus.

2. The multimeric binding molecule of claim 1, wherein the human coronavirus is SARS-CoV, MERS-CoV, SARS-CoV-2, variants thereof, derivatives thereof, or any combination thereof.

3. The multimeric binding molecule of claim 1, wherein the binding molecule can neutralize infectivity of the human coronavirus at a lower 50% effective concentration (EC₅₀) than the bivalent reference IgG antibody, and wherein the EC₅₀ is at least two-fold, at least five-fold, at least ten-fold, at least fifty-fold, at least 100-fold, at least 500-fold, or at least 1000-fold lower than the EC₅₀ of the bivalent reference IgG antibody.

4. The multimeric binding molecule of claim 1, wherein the binding molecule can inhibit binding of the human coronavirus to its receptor at a lower 50% inhibitory concentration (IC₅₀) than the bivalent reference IgG antibody.

5. The multimeric binding molecule of claim 4, wherein the human coronavirus is SARS-CoV or SARS-CoV-2 and the receptor is human angiotensin-converting enzyme 2 (ACE2), or wherein the human coronavirus is MERS-CoV and the receptor is human dipeptidyl-peptidase 4 (DPP4).

6. The multimeric binding molecule of claim 1, wherein the three to twelve binding domains that specifically bind to a human coronavirus bind a human coronavirus structural protein or fragment thereof, wherein the human coronavirus structural protein comprises a nucleocapsid (N) protein, a membrane (M) protein, an envelope (E) protein, a spike (S) protein, any fragment thereof, any subunit thereof, or any combination thereof.

7. The multimeric binding molecule of claim 6, wherein the three to twelve binding domains specifically bind to the human coronavirus S protein, and wherein the binding domains bind the S protein subunit 1 (S1), the S protein receptor binding domain (RBD), the S protein subunit 2 (S2), the S protein furin cleavage site, or any combination thereof.

8. The multimeric binding molecule of claim 1, wherein the three to twelve identical binding domains are immunoglobulin antigen binding domains comprising a heavy chain variable region (VH) and a light chain variable region (VL), and wherein each binding unit comprises two heavy chains each comprising a VH and two light chains each comprising a VL.

9. The multimeric binding molecule of claim 8, wherein the human coronavirus is SARS-CoV-2, wherein the VH and VL comprise six immunoglobulin complementarity determining regions HCDR1, HCDR2, HCDR3, LCDR1, LCDR2, and LCDR3, wherein the HCDR1, HCDR2, HCDR3, LCDR1, LCDR2, and LCDR3 comprise the CDRs of an antibody comprising the VH and VL of SEQ ID NO: 88 and SEQ ID NO: 89, SEQ ID NO: 260 and SEQ ID NO: 261, SEQ ID NO: 264 and SEQ ID NO: 265, SEQ ID NO: 266 and SEQ ID NO: 267, SEQ ID NO: 274 and SEQ ID NO: 275, SEQ ID NO: 278, and SEQ ID NO: 279, SEQ ID NO: 280 and SEQ ID NO: 281, SEQ ID NO: 282 and SEQ ID NO: 283, SEQ ID NO: 292 and SEQ ID NO: 293, SEQ ID NO:384 and SEQ ID NO: 385, or SEQ ID NO: 646 and SEQ ID NO: 647, respectively or wherein the VH and VL comprise amino acid sequences at least 80%, at least 85%, at least 90%, at least 95% or 100% identical to the recited VH and VL amino acid sequences, respectively, and wherein the bivalent reference IgG antibody comprising two of the binding domains can neutralize SARS-CoV-2.

10. The multimeric binding molecule of claim 8, wherein the human coronavirus is SARS-CoV, wherein the VH and VL comprise six immunoglobulin complementarity determining regions HCDR1, HCDR2, HCDR3, LCDR1, LCDR2, and LCDR3, wherein the HCDR1, HCDR2, HCDR3, LCDR1, LCDR2, and LCDR3 comprise the CDRs of an antibody comprising the VH and VL of SEQ ID NO: 84 and SEQ ID NO: 85, SEQ ID NO: 260 and SEQ ID NO: 261, SEQ ID NO: 262 and SEQ ID NO: 263, SEQ ID NO: 296 and SEQ ID NO: 297, SEQ ID NO: 628 and SEQ ID NO: 629, SEQ ID NO: 632 and SEQ ID NO: 633, SEQ ID NO: 634 and SEQ ID NO: 635, SEQ ID NO: 636 and SEQ ID NO: 637, SEQ ID NO: 638 and SEQ ID NO: 639, SEQ ID NO: 640 and SEQ ID NO: 641, SEQ ID NO: 642 and SEQ ID NO: 643, or SEQ ID NO: 644 and SEQ ID NO: 645, respectively or wherein the VH and VL comprise amino acid sequences at least 80%, at least 85%, at least 90%, at least 95% or 100% identical to the recited VH and VL amino acid sequences, respectively, and wherein the bivalent reference IgG antibody comprising two of the binding domains can neutralize SARS-CoV.

11. The multimeric binding molecule of claim 8, wherein the human coronavirus is MERS-CoV, wherein the VH and VL comprise six immunoglobulin complementarity determining regions HCDR1, HCDR2, HCDR3, LCDR1, LCDR2, and LCDR3, wherein the HCDR1, HCDR2, HCDR3, LCDR1, LCDR2, and LCDR3 comprise the CDRs of an antibody comprising the VH and VL of SEQ ID NO: 522 and SEQ ID NO: 523, SEQ ID NO: 576 and SEQ ID NO: 577, SEQ ID NO: 610 and SEQ ID NO: 611, SEQ ID NO: 612 and SEQ ID NO: 613, SEQ ID NO: 614 and SEQ ID NO: 615, or SEQ ID NO: 630 and SEQ ID NO: 631, respectively or wherein the VH and VL comprise amino acid sequences at least 80%, at least 85%, at least 90%, at least 95% or 100% identical to the recited VH and VL amino acid sequences, respectively, and wherein the bivalent reference IgG antibody comprising two of the binding domains can neutralize MERS-CoV.

12. The multimeric binding molecule of claim 1, which can neutralize escape mutants of the bivalent reference IgG antibody comprising two of the binding domains.

13. The multimeric binding molecule of claim 1, comprising two or four bivalent IgA or IgA-like binding units and a J chain or functional fragment or variant thereof wherein each binding unit comprises two IgA heavy chains each comprising a VH situated amino terminal to the IgA constant region or multimerizing fragment or variant thereof, and two immunoglobulin light chains each comprising a VL situated amino terminal to an immunoglobulin light chain constant region.

14. The multimeric binding molecule of claim 13, wherein the IgA heavy chain constant regions or multimerizing fragments or variants thereof are human IgA constant regions.

15. The multimeric binding molecule of claim 13, wherein the J-chain or functional fragment or variant thereof further comprises a heterologous polypeptide, wherein the heterologous polypeptide is directly or indirectly fused to the J-chain or functional fragment or variant thereof.

16. The multimeric binding molecule of claim 1, comprising five or six bivalent IgM or IgM-like binding units, wherein each binding unit comprises two IgM heavy chain constant regions or multimerizing fragments or variants thereof, wherein each binding unit comprises two IgM heavy chains each comprising a VH situated amino terminal to an IgM constant region or multimerizing fragment or variant thereof, and two immunoglobulin light chains each comprising a VL situated amino terminal to an immunoglobulin light chain constant region.

17. The multimeric binding molecule of claim 16, wherein the IgM heavy chain constant regions or multimerizing fragments or variants thereof are human IgM constant regions.

18. The multimeric binding molecule of claim 16 which is pentameric, and further comprises a J-chain or functional fragment or variant thereof.

19. The multimeric binding molecule of claim 18, wherein the J-chain or functional fragment or variant thereof further comprises a heterologous polypeptide, wherein the heterologous polypeptide is directly or indirectly fused to the J-chain or functional fragment or variant thereof.

20. A composition comprising the multimeric binding molecule of claim 1; or comprising two or more nonidentical multimeric binding molecules according to claim 1, wherein the two or more multimeric binding molecules bind to different epitopes of a single human coronavirus.

21. A polynucleotide comprising a nucleic acid sequence that encodes a polypeptide subunit of the binding molecule of claim 1.

22. A vector comprising the polynucleotide of claim 21.

23. A host cell comprising the polynucleotide of claim 21, wherein the host cell can express a multimeric binding molecule comprising two to six bivalent binding units or variants or fragments thereof, wherein each binding unit comprises two IgM or IgA heavy chain constant regions or multimerizing fragments or variants thereof, each associated with a binding domain, wherein three to twelve of the binding domains are identical and specifically bind to a human coronavirus, and wherein the binding molecule is more potent than a bivalent reference IgG antibody comprising two of the binding domains that specifically bind to the human coronavirus.

24. A method for treating or preventing a human coronavirus disease in a subject in need of treatment comprising administering to the subject an effective amount of the multimeric binding molecule of claim 1, wherein the multimeric binding molecule exhibits greater potency than an equivalent amount of a bivalent reference IgG antibody comprising two of the binding domains that specifically bind to the human coronavirus.

25. The method of claim 24, wherein the human coronavirus disease is severe acute respiratory syndrome (SARS), coronavirus disease 2019 (COVID-19), or Middle East Respiratory Syndrome (MERS).

26. The method of claim 24, wherein the subject is human.

27. The method of claim 24, wherein administering comprises intravenous, subcutaneous, intramuscular, intranasal, and/or inhalation administration.
